(19) United States
(12) Patent Application Publication
(10) Pub. No.: US 2024/0002473 A1
(43) Pub. Date: Jan. 4, 2024

(54) MEMBRANE PROTEIN TARGETING ENGINEERED DEUBIQUITINASES AND METHODS OF USE THEREOF

(71) Applicant: FLUX THERAPEUTICS, INC., New York, NY (US)

(72) Inventors: Andreas LOEW, MATTAPOISETT, MA (US); Samuel W. HALL, Brooklyn, NY (US)

(21) Appl. No.: 18/251,848

(22) PCT Filed: Nov. 5, 2021
(86) PCT No.: PCT/US2021/058291

§ 371 Date: May 4, 2023

Related U.S. Application Data
(60) Provisional application No. 63/110,619, filed on Nov. 6, 2020.

(51) Int. Cl. C07K 14/81; C07K 16/44

(52) U.S. Cl. CPC C07K 14/8139; C07K 14/8146; C07K 16/44; A61K 38/00

(57) ABSTRACT

Provided herein are fusion protein comprising: an effector domain comprising a catalytic domain of a deubiquitinase, or a functional fragment or functional variant thereof; and a targeting domain comprising a moiety that specifically binds a membrane protein. Also provided herein are methods of using the fusion proteins to treat a disease, including genetic diseases.

### CROSS-REFERENCE TO RELATED APPLICATIONS

[0001] This application claims the benefit under 35 U.S.C. § 119(e) of U.S. Provisional Patent Application No. 63/110,619, filed Nov. 6, 2020, the entire disclosure of which is incorporated herein by reference.

### 1. FIELD

[0002] This disclosure relates to fusion proteins comprising an effector domain comprising a catalytic domain of a deubiquitinase, or a functional fragment or functional variant thereof; and a targeting domain comprising a moiety that specifically binds a target membrane protein. The disclosure further relates to therapeutic methods of using the same.

### 2. BACKGROUND

[0003] A subset of genetic diseases are associated with a decrease in the level of expression of a functional membrane protein or a decrease in the stability of a membrane protein. For example, haploinsufficiency genetic diseases are caused by the presence a single copy of a wild-type allele in heterozygous combination with a loss of function variant allele, wherein the level of functional protein expressed is insufficient to produce the standard phenotype. Haploinsufficiency can arise from a de novo or inherited loss-of-function mutation in the variant allele, such that it produces little or no functional protein. Despite recent developments in gene therapy, there are still no curative treatments for these diseases, and treatment typically centers on the management of symptoms. Therefore, new treatments are needed for diseases, e.g., genetic diseases, that are associated with decreased functional membrane protein expression or stability.

### 3. SUMMARY

[0004] Provided herein are, inter alia, engineered deubiquitinases (enDubs) that comprise a targeting moiety that specifically binds a membrane target protein and a catalytic domain of a deubiquitinase. The targeting moiety directs that deubiquitinase catalytic domain to the specific target membrane protein for deubiquitination. The fusion proteins described herein are particularly useful in methods of treating genetic diseases, particularly those associated with or caused by decreased expression or stability of a specific membrane protein.

[0005] In one aspect, provided herein are fusion proteins comprising: an effector domain comprising a catalytic domain of a deubiquitinase, or a functional fragment or functional variant thereof; and a targeting domain comprising a targeting moiety that specifically binds a membrane protein that is not an ion channel.

[0006] In some embodiments, the deubiquitinase is a cysteine protease or a metalloprotease.

[0007] In some embodiments, the deubiquitinase is a cysteine protease. In some embodiments, the cysteine protease is a ubiquitin-specific protease (USP), a ubiquitin C-terminal hydrolase (UCH), a Machado-Josephin domain protease (MJD), an ovarian tumour protease (OTU), a MINDY protease, or a ZUFSP protease.

[0008] In some embodiments, the cysteine protease is a USP. In some embodiments, the USP is USP1, USP2, USP3, USP4, USP5, USP6, USP7, USP8, USP9X, USP9Y, USP10, USP11, USP12, USP13, USP14, USP15, USP16, USP17, USP17L2, USP17L3, USP17L4, USP17L5, USP17L7, USP17L8, USP18, USP19, USP20, USP21, USP22, USP23, USP24, USP25, USP26, USP27X, USP28, USP29, USP30, USP31, USP32, USP33, USP34, USP35, USP36, USP37, USP38, USP39, USP40, USP41, USP42, USP43, USP44, USP45, or USP46.

[0009] In some embodiments, the cysteine protease is a UCH. In some embodiments, the UCH is BAP1, UCHL1, UCHL3, or UCHL5.

[0010] In some embodiments, the cysteine protease is a MJD. In some embodiments, the MJD is ATXN3 or ATXN3L.

[0011] In some embodiments, the cysteine protease is a OTU. In some embodiments, the OTU is OTUB1 or OTUB2.

[0012] In some embodiments, the cysteine protease is a MINDY. In some embodiments, the MINDY is MINDY1, MINDY2, MINDY3, or MINDY4.

[0013] In some embodiments, the cysteine protease is a ZUFSP. In some embodiments, the ZUFSP is ZUP1.

[0014] In some embodiments, the deubiquitinase is a metalloprotease. In some embodiments, the metalloprotease is a Jab1/Mov34/Mpr1 Pad1 N-terminal+(MPN+) (JAMM) domain protease.

[0015] In some embodiments, the deubiquitinase comprises an amino acid sequence at least 80%, 81%, 82%, 83%, 84%, 85%, 86%, 87%, 88%, 89%, 90%, 91%, 92%, 93%, 94%, 95%, 96%, 97%, 98%, 99%, or 100% identical to the amino acid sequence of any one of SEQ ID NOS: 1-112.

[0016] In some embodiments, the catalytic domain comprises a catalytic domain derived from a deubiquitinase at least 80%, 81%, 82%, 83%, 84%, 85%, 86%, 87%, 88%, 89%, 90%, 91%, 92%, 93%, 94%, 95%, 96%, 97%, 98%, 99%, or 100% identical to the amino acid sequence of any one of SEQ ID NOS: 1-112.

[0017] In some embodiments, the catalytic domain comprises an amino acid sequence at least 80%, 81%, 82%, 83%, 84%, 85%, 86%, 87%, 88%, 89%, 90%, 91%, 92%, 93%, 94%, 95%, 96%, 97%, 98%, 99%, or 100% identical to the amino acid sequence of any one of SEQ ID NOS: 113-220 or 293.

[0018] In some embodiments, the catalytic domain comprises an amino acid sequence at least 80%, 81%, 82%, 83%, 84%, 85%, 86%, 87%, 88%, 89%, 90%, 91%, 92%, 93%, 94%, 95%, 96%, 97%, 98%, 99%, or 100% identical to the amino acid sequence of SEQ ID NO: 293.

[0019] In some embodiments, the moiety that specifically binds a membrane protein comprises an antibody, or functional fragment or functional variant thereof. In some embodiments, the antibody, or functional fragment or functional variant thereof, comprises a full-length antibody, a single chain variable fragment (scFv), a scFv2, a scFv-Fc, a Fab, a Fab′, a F(ab′)2, a F(v), a VHH, or a (VHH)₂. In some embodiments, the antibody, or functional fragment or functional variant thereof, comprises a VHH or a (VHH)₂.

[0020] In some embodiments, the membrane protein is selected from the group consisting of solute carrier family 2, facilitated glucose transporter member 1 (SLC2A1), proline-rich transmembrane protein 2 (PRRT2), usherin (USH2A), protocadherin-19 (PCDH19), tuberin (TSC2), hamartin (TSC1), dystrophin (DMD), Rhodopsin (RHO), protein jagged-1 (JAG1), inositol 1,4,5-trisphosphate receptor type 1 (ITPR1), sugar transporter SWEET1 (SLC50A1), transmembrane protein 258 (TMEM258), or follicle stimulating hormone receptor (FSHR).

[0021] In some embodiments, the membrane protein comprises an amino acid sequence at least 90%, 91%, 92%, 93%, 94%, 95%, 96%, 97%, 98%, 99%, or 100% identical to the amino acid sequence of any one of SEQ ID NOS: 221-227 or 243-245.

[0022] In some embodiments, the effector domain is directly operably connected to the targeting domain. In some embodiments, the effector domain is indirectly operably connected to the targeting domain. In some embodiments, the effector domain is indirectly operably connected to the targeting domain via a peptide linker. In some embodiments, the effector domain is indirectly operably connected to the targeting domain via a peptide linker of sufficient length such that the effector domain and the targeting domain can simultaneous bind the respective target proteins. In some embodiments, the peptide linker comprises the amino acid sequence of any one of SEQ ID NOS: 297-424, or the amino acid sequence of any one of SEQ ID NOS: 297-424 comprising 1, 2, or 3 amino acid modifications. In some embodiments, the peptide linker comprises the amino acid sequence of any one of SEQ ID NOS: 297-306, or the amino acid sequence of any one of SEQ ID NOS: 297-306 comprising 1, 2, or 3 amino acid modifications.

[0023] In some embodiments, the effector domain is operably connected either directly or indirectly to the C terminus of the targeting domain. In some embodiments, the effector moiety is operably connected either directly or indirectly to the N terminus of the targeting domain.

[0024] In one aspect, provided herein are fusion proteins comprising: an effector domain comprising a catalytic domain of a deubiquitinase, or a functional fragment or functional variant thereof; and a targeting domain comprising a targeting moiety that specifically binds a membrane protein selected from the group consisting of glutamate receptor ionotropic NMDA 2B (GRIN2B), cystic fibrosis transmembrane conductance regulator (CFTR), sodium channel protein type 1 subunit alpha (SCN1A), copper-transporting ATPase 2 (ATP7B), potassium voltage-gated channel subfamily KQT member 2 (KCNQ2), sodium channel protein type 2 subunit alpha (SCN2A), voltage-dependent P/Q-type calcium channel subunit alpha-1A (CACNA1A), sodium channel protein type 8 subunit alpha (SCN8A), glutamate receptor ionotropic, NMDA 2A (GRIN2A), sodium- and chloride-dependent GABA transporter 1 (SLC6A1), sodium/potassium-transporting ATPase subunit alpha-2 (ATP1A2), sodium/potassium-transporting ATPase subunit alpha-3 (ATP1A3), sodium channel protein type 9 subunit alpha (SCN9A), gamma-aminobutyric acid receptor subunit beta-3 (GABRB3), and potassium voltage-gated channel subfamily KQT member 3 (KCNQ3).

[0025] In some embodiments, the moiety that specifically binds a membrane protein comprises an antibody, or functional fragment or functional variant thereof. In some embodiments, the antibody, or functional fragment or functional variant thereof, comprises a full-length antibody, a single chain variable fragment (scFv), a scFv2, a scFv-Fc, a Fab, a Fab′, a F(ab′)2, a F(v), a VHH, or a (VHH)₂. In some embodiments, the antibody, or functional fragment or functional variant thereof, comprises a VHH or a (VHH)₂.

[0026] In some embodiments, the membrane protein comprises an amino acid sequence at least 90%, 91%, 92%, 93%, 94%, 95%, 96%, 97%, 98%, 99%, or 100% identical to the amino acid sequence of any one of SEQ ID NOS: 228-245.

[0027] In some embodiments, the deubiquitinase is a cysteine protease or a metalloprotease. In some embodiments, the deubiquitinase is a cysteine protease.

[0028] In some embodiments, the cysteine protease is a ubiquitin-specific protease (USP), a ubiquitin C-terminal hydrolase (UCH), a Machado-Josephin domain protease (MJD), an ovarian tumour protease (OTU), a MINDY protease, or a ZUFSP protease.

[0029] In some embodiments, the cysteine protease is a USP. In some embodiments, the USP is USP1, USP2, USP3, USP4, USP5, USP6, USP7, USP8, USP9X, USP9Y, USP10, USP11, USP12, USP13, USP14, USP15, USP16, USP17, USP17L2, USP17L3, USP17L4, USP17L5, USP17L7, USP17L8, USP18, USP19, USP20, USP21, USP22, USP23, USP24, USP25, USP26, USP27X, USP28, USP29, USP30, USP31, USP32, USP33, USP34, USP35, USP36, USP37, USP38, USP39, USP40, USP41, USP42, USP43, USP44, USP45, or USP46.

[0030] In some embodiments, the cysteine protease is a UCH. In some embodiments, the UCH is BAP1, UCHL1, UCHL3, or UCHL5.

[0031] In some embodiments, the cysteine protease is a MJD. In some embodiments, the MJD is ATXN3 or ATXN3L.

[0032] In some embodiments, the cysteine protease is a OTU. In some embodiments, the OTU is OTUB1 or OTUB2.

[0033] In some embodiments, the cysteine protease is a MINDY. In some embodiments, the MINDY is MINDY1, MINDY2, MINDY3, or MINDY4.

[0034] In some embodiments, the cysteine protease is a ZUFSP. In some embodiments, the ZUFSP is ZUP1.

[0035] In some embodiments, the deubiquitinase is a metalloprotease. In some embodiments, the metalloprotease is a Jab1/Mov34/Mpr1 Pad1 N-terminal+(MPN+) (JAMM) domain protease.

[0036] In some embodiments, the deubiquitinase comprises an amino acid sequence at least 80%, 81%, 82%, 83%, 84%, 85%, 86%, 87%, 88%, 89%, 90%, 91%, 92%, 93%, 94%, 95%, 96%, 97%, 98%, 99%, or 100% identical to the amino acid sequence of any one of SEQ ID NOS: 1-112.

[0037] In some embodiments, the catalytic domain comprises a catalytic domain derived from a deubiquitinase at least 80%, 81%, 82%, 83%, 84%, 85%, 86%, 87%, 88%, 89%, 90%, 91%, 92%, 93%, 94%, 95%, 96%, 97%, 98%, 99%, or 100% identical to the amino acid sequence of any one of SEQ ID NOS: 1-112.

[0038] In some embodiments, the catalytic domain comprises an amino acid sequence at least 80%, 81%, 82%, 83%, 84%, 85%, 86%, 87%, 88%, 89%, 90%, 91%, 92%, 93%, 94%, 95%, 96%, 97%, 98%, 99%, or 100% identical to the amino acid sequence of any one of SEQ ID NOS: 113-220 or 293.

[0039] In some embodiments, the catalytic domain comprises an amino acid sequence at least 80%, 81%, 82%, 83%, 84%, 85%, 86%, 87%, 88%, 89%, 90%, 91%, 92%, 93%, 94%, 95%, 96%, 97%, 98%, 99%, or 100% identical to the amino acid sequence of SEQ ID NO: 293.

[0040] In some embodiments, the effector domain is directly operably connected to the targeting domain. In some embodiments, the effector domain is indirectly operably connected to the targeting domain. In some embodiments, the effector domain is indirectly operably connected to the targeting domain via a peptide linker. In some embodiments, the effector domain is indirectly operably connected to the targeting domain via a peptide linker of sufficient length such that the effector domain and the targeting domain can simultaneous bind the respective target proteins. In some embodiments, the peptide linker comprises the amino acid sequence of any one of SEQ ID NOS: 297-424, or the amino acid sequence of any one of SEQ ID NOS: 297-424 comprising 1, 2, or 3 amino acid modifications. In some embodiments, the peptide linker comprises the amino acid sequence of any one of SEQ ID NOS: 297-306, or the amino acid sequence of any one of SEQ ID NOS: 297-306 comprising 1, 2, or 3 amino acid modifications.

[0041] In some embodiments, the effector domain is operably connected either directly or indirectly to the C terminus of the targeting domain. In some embodiments, the effector moiety is operably connected either directly or indirectly to the N terminus of the targeting domain.

[0042] In one aspect, provided herein are nucleic acid molecules encoding a fusion protein described herein. In some embodiments, the nucleic acid molecule is a DNA molecule. In some embodiments, the nucleic acid molecule is an RNA molecule.

[0043] In one aspect, provided herein are vectors comprising a nucleic acid molecule described herein (e.g., a nucleic acid molecule encoding a fusion protein described herein). In some embodiments, the vector is a plasmid or a viral vector.

[0044] In one aspect, provided herein are viral particles comprising a nucleic acid molecule described herein (e.g., a nucleic acid molecule encoding a fusion protein described herein).

[0045] In one aspect, provided herein are in vitro cell or population of cells comprising a fusion protein described herein, a nucleic acid molecule described herein, or a vector described herein.

[0046] In one aspect, provided herein are pharmaceutical compositions comprising a fusion protein described herein, a nucleic acid described herein, a vector described herein, or a viral particle described herein, and an excipient.

[0047] In one aspect, provided herein are methods of making a fusion protein described herein, comprising introducing into an in vitro cell or population of cells a nucleic acid molecule described herein, a vector described herein, or a viral particle described herein; culturing the cell or population of cells in a culture medium under conditions suitable for expression of the fusion protein, isolating the fusion protein from the culture medium, and optionally purifying the fusion protein.

[0048] In one aspect, provided herein are methods of treating or preventing a disease in a subject comprising administering a fusion protein described herein, a nucleic acid molecule described herein, a vector described herein, a viral particle described herein, or a pharmaceutical composition described herein, to a subject in need thereof. In some embodiments, the subject is human.

[0049] In some embodiments, the disease is associated with decreased expression of a functional version of the mitochondrial protein relative to a non-diseased control. In some embodiments, the disease is associated with decreased stability of a functional version of the mitochondrial protein relative to a non-diseased control. In some embodiments, the disease is associated with increased ubiquitination of the nuclear protein relative to a non-diseased control. In some embodiments, the disease is associated with increased ubiquitination and degradation of the mitochondrial protein relative to a non-diseased control. In some embodiments, the disease is a genetic disease. In some embodiments, the disease is a genetic disease. In some embodiments, the genetic disease is a haploinsufficiency disease.

[0050] In some embodiments, the disease is a GRIN2B-Related Disorder, a SCN2A-Related Disorder, a SCN8A-Related Disorder, SLC6A1-Related Disorder, a PRRT2 Dyskinesia & Epilepsy, a GRIN2A-Related Disorder, a CACNA1A-Related Disorder, a SCN9A Epilepsy, a PCDH19 Encephalopathy, GLUT1 deficiency syndrome, episodic kinesigenic dyskinesia 1, Usher syndrome type 2A, early infantile epileptic encephalopathy type 9, tuberous sclerosis type 2; tuberous sclerosis type 1, a KCNQ2-Related Disorder (e.g., epileptic encephalopathy), Becker Muscular Dystrophy, autosomal Dominant RP, Alagille syndrome 1, Gillespie Syndrome.

[0051] In some embodiments, the disease is early infantile epileptic encephalopathy type 11, early infantile epileptic encephalopathy type 13, early infantile epileptic encephalopathy type 27, cystic fibrosis, Dravet syndrome, Wilson disease, episodic ataxia type 2; epilepsy (e.g., focal, with speech disorder and with or without mental retardation), myoclonic-atonic epilepsy, alternating hemiplegia of childhood, alternating hemiplegia of childhood type 2, epilepsy type 7, GABRB3 associated epilepsy, or a KCNQ2-Related Disorder (e.g., epileptic encephalopathy).

[0052] In some embodiments, the disease is a GRIN2B-Related Disorder, a SCN2A-Related Disorder, a SCN8A-Related Disorder, SLC6A1-Related Disorder, a PRRT2 Dyskinesia & Epilepsy, a GRIN2A-Related Disorder, a CACNA1A-Related Disorder, a SCN9A Epilepsy, a PCDH19 Encephalopathy, early infantile epileptic encephalopathy type 9, early infantile epileptic encephalopathy type 11, early infantile epileptic encephalopathy type 13, early infantile epileptic encephalopathy type 27, cystic fibrosis, Dravet syndrome, Wilson disease, episodic ataxia type 2; GLUT1 deficiency syndrome, episodic kinesigenic dyskinesia 1, epilepsy (e.g., focal, with speech disorder and with or without mental retardation), KCNQ2 encephalopathy, myoclonic-atonic epilepsy, Usher syndrome type 2A, alternating hemiplegia of childhood, alternating hemiplegia of childhood type 2, epilepsy type 7, GABRB3 associated epilepsy; tuberous sclerosis type 2; tuberous sclerosis type 1, Becker Muscular Dystrophy, autosomal Dominant RP, Alagille syndrome 1, or Gillespie Syndrome.

[0053] In some embodiments, the target membrane protein is GRIN2B, and the disease is a GRIN2B related disorder (e.g., an epileptic encephalopathy); the target membrane protein is GRIN2B, and the disease is an early infantile epileptic encephalopathy; the target membrane protein is GRIN2B, and the disease is early infantile epileptic encephalopathy type 27; the target membrane protein is CFTR, and the disease is cystic fibrosis; the target membrane protein is SCN1A, and the disease is Dravet syndrome; the target membrane protein is ATP7B, and the disease is Wilson disease; the target membrane protein is CACNA1A, and the disease is a CACA1A related disorder; the target membrane protein is CACNA1A, and the disease is episodic ataxia type 2; the target membrane protein is KCNQ2, and the disease is an KCNQ2 encephalopathy; the target membrane protein is KCNQ2, and the disease is an epileptic encephalopathy; the target membrane protein is SCN2A, and the disease is a SCN2A related disorder (e.g., an epileptic encephalopathy); the target membrane protein is SCN2A, and the disease is early infantile epileptic encephalopathy type 11; the target membrane protein is SLC2A1, and the disease is GLUT1 deficiency syndrome; the target membrane protein is SCN8A, and the disease is a SCN8A related disorder (e.g., an epileptic encephalopathy); the target membrane protein is SCN8A, and the disease is an epileptic encephalopathy; the target membrane protein is SCN8A, and the disease is early infantile epileptic encephalopathy type 13; the target membrane protein is PRRT2, and the disease is a PRRPT2 dyskinesia and/or epilepsy; the target membrane protein is PRRT2, and the disease is an episodic kinesigenic dyskinesia type; the target membrane protein is PRRT2, and the disease is episodic kinesigenic dyskinesia type 1; the target membrane protein is GRIN2A, and the disease is a GRIN2A related disorder; the target membrane protein is GRIN2A, and the disease is epilepsy; the target membrane protein is GRIN2A, and the disease is focal epilepsy; the target membrane protein is GRIN2A, and the disease is focal epilepsy with speech disorder and with or without mental retardation; the target membrane protein is SLC6A1, and the disease is a SLC6A1 related disorder; the target membrane protein is SLC6A1, and the disease is epilepsy; the target membrane protein is SLC6A1, and the disease is myoclonic-atonic epilepsy; the target membrane protein is USH2A, and the disease is Usher syndrome; the target membrane protein is USH2A, and the disease is Usher syndrome type 2A; the target membrane protein is ATP1A2, and the disease is alternating hemiplegia of childhood; the target membrane protein is ATP1A2, and the disease is alternating hemiplegia of childhood type 1; the target membrane protein is ATP1A3, and the disease is alternating hemiplegia of childhood; the target membrane protein is ATP1A3, and the disease is alternating hemiplegia of childhood type 2; the target membrane protein is SCN9A, and the disease an SCN9A epilepsy; the target membrane protein is SCN9A1, and the disease an SCN9A epilepsy; the target membrane protein is SCN9A1, and the disease is epilepsy; the target membrane protein is SCN9A1, and the disease is epilepsy type 7; the target membrane protein is PCDH19, and the disease is PCDH19 encephalopathy; the target membrane protein is PCDH19, and the disease is an early infantile epileptic encephalopathy; the target membrane protein is PCDH19, and the disease is early infantile epileptic encephalopathy type 9; the target membrane protein is GABRB3, and the disease is epilepsy; the target membrane protein is GABRB3, and the disease is GABRB3 associated epilepsy; the target membrane protein is TSC2, and the disease is tuberous sclerosis; the target membrane protein is TSC2, and the disease is tuberous sclerosis type 2; the target membrane protein is TSC2, and the disease is tuberous sclerosis type 1; the target membrane protein is TSC1, and the disease is tuberous sclerosis; the target membrane protein is TSC1, and the disease is tuberous sclerosis type 1; the target membrane protein is TSC1, and the disease is tuberous sclerosis type 2; the target membrane protein is KCNQ3, and the disease is KCNQ2-Related Disorders (Epileptic Encephalopathy); the target membrane protein is DMD, and the disease is Becker Muscular Dystrophy; the target membrane protein is RHO, and the disease is Autosomal Dominant RP; the target membrane protein is JAG1, and the disease is Alagille syndrome 1; the target membrane protein is ITPR1, and the disease is Gillespie Syndrome; or the target membrane protein is FSHR, and the disease is ovarian dysgenesis 1 (ODG1).

[0054] In some embodiments, the fusion protein is administered at a therapeutically effective dose. In some embodiments, the fusion protein is administered systematically or locally. In some embodiments, the fusion protein is administered intravenously, subcutaneously, or intramuscularly.

[0055] In one aspect, provided herein are fusion proteins described herein, polynucleotides described herein, DNA described herein, RNA described herein, vectors described herein, viral particles described herein, and pharmaceutical compositions described herein for use as a medicament.

[0056] In one aspect, provided herein are fusion proteins described herein, polynucleotides described herein, DNA described herein, RNA described herein, vectors described herein, viral particles described herein, and pharmaceutical compositions described herein for use in treating or inhibiting a genetic disorder.

[0057] In one aspect, provided herein are fusion proteins comprising: (a) an effector domain comprising a catalytic domain of a deubiquitinase, or a functional fragment or functional variant thereof; and (b) a targeting domain comprising a targeting moiety that specifically binds a membrane protein that is not an ion channel.

[0058] In some embodiments, the deubiquitinase is a cysteine protease or a metalloprotease.

[0059] In some embodiments, the deubiquitinase is a cysteine protease. In some embodiments, the cysteine protease is a ubiquitin-specific protease (USP), a ubiquitin C-terminal hydrolase (UCH), a Machado-Josephin domain protease (MJD), an ovarian tumour protease (OTU), a MINDY protease, or a ZUFSP protease.

[0060] In some embodiments, the cysteine protease is a USP. In some embodiments, the USP is selected from the group consisting of USP1, USP2, USP3, USP4, USP5, USP6, USP7, USP8, USP9X, USP9Y, USP10, USP11, USP12, USP13, USP14, USP15, USP16, USP17, USP17L2, USP17L3, USP17L4, USP17L5, USP17L7, USP17L8, USP18, USP19, USP20, USP21, USP22, USP23, USP24, USP25, USP26, USP27X, USP28, USP29, USP30, USP31, USP32, USP33, USP34, USP35, USP36, USP37, USP38, USP39, USP40, USP41, USP42, USP43, USP44, USP45, and USP46.

[0061] In some embodiments, the cysteine protease is a UCH. In some embodiments, the UCH is selected from the group consisting of BAP1, UCHL1, UCHL3, and UCHL5.

[0062] In some embodiments, the cysteine protease is a MJD. In some embodiments, the MJD is selected from the group consisting of ATXN3 and ATXN3L.

[0063] In some embodiments, the cysteine protease is a OTU. In some embodiments, the OTU is selected from the group consisting of OTUB1 and OTUB2.

[0064] In some embodiments, the cysteine protease is a MINDY. In some embodiments, the MINDY is selected from the group consisting of MINDY1, MINDY2, MINDY3, and MINDY4.

[0065] In some embodiments, the cysteine protease is a ZUFSP. In some embodiments, the ZUFSP is ZUP1.

[0066] In some embodiments, the deubiquitinase is a metalloprotease. In some embodiments, the metalloprotease is a Jab1/Mov34/Mpr1 Pad1 N-terminal+(MPN+) (JAMM) domain protease.

[0067] In some embodiments, the deubiquitinase comprises an amino acid sequence at least 80%, 81%, 82%, 83%, 84%, 85%, 86%, 87%, 88%, 89%, 90%, 91%, 92%, 93%, 94%, 95%, 96%, 97%, 98%, 99%, or 100% identical to any one of SEQ ID NOS: 1-112.

[0068] In some embodiments, the catalytic domain comprises a catalytic domain derived from a deubiquitinase at least 80%, 81%, 82%, 83%, 84%, 85%, 86%, 87%, 88%, 89%, 90%, 91%, 92%, 93%, 94%, 95%, 96%, 97%, 98%, 99%, or 100% identical to any one of SEQ ID NOS: 1-112.

[0069] In some embodiments, the catalytic domain comprises an amino acid sequence at least 80%, 81%, 82%, 83%, 84%, 85%, 86%, 87%, 88%, 89%, 90%, 91%, 92%, 93%, 94%, 95%, 96%, 97%, 98%, 99%, or 100% identical to any one of SEQ ID NOS: 113-220.

[0070] In some embodiments, the moiety that specifically binds a membrane protein comprises an antibody, or functional fragment or functional variant thereof. In some embodiments, the antibody, or functional fragment or functional variant thereof, comprises a full-length antibody, a single chain variable fragment (scFv), a scFv2, a scFv-Fc, a Fab, a Fab′, a F(ab′)2, a F(v), or a VHH. In some embodiments, the antibody, or functional fragment or functional variant thereof, comprises a VHH.

[0071] In some embodiments, the membrane protein is selected from the group consisting of solute carrier family 2, facilitated glucose transporter member 1 (SLC2A1), proline-rich transmembrane protein 2 (PRRT2), usherin (USH2A), protocadherin-19 (PCDH19), tuberin (TSC2), hamartin (TSC1), and dystrophin (DMD).

[0072] In some embodiments, the membrane protein comprises an amino acid sequence at least 90%, 91%, 92%, 93%, 94%, 95%, 96%, 97%, 98%, 99%, or 100% identical to any one of SEQ ID NOS: 221-227 or 243-245.

[0073] In some embodiments, the effector domain is directly fused to the targeting domain.

[0074] In some embodiments, the effector domain is indirectly fused to the targeting domain.

[0075] In some embodiments, the effector domain is indirectly fused to the targeting domain via a peptide linker. In some embodiments, the effector domain is indirectly fused to the targeting domain via a peptide linker of sufficient length such that the effector domain and the targeting domain can simultaneous bind the respective target proteins.

[0076] In some embodiments, the effector domain is fused to the C terminus of the targeting domain. In some embodiments, the effector moiety is fused to the N terminus of the targeting domain.

[0077] In one aspect, provided herein are fusion proteins comprising: (a) an effector domain comprising a catalytic domain of a deubiquitinase, or a functional fragment or functional variant thereof; and (b) a targeting domain comprising a targeting moiety that specifically binds a membrane protein selected from the group consisting of glutamate receptor ionotropic NMDA 2B (GRIN2B), cystic fibrosis transmembrane conductance regulator (CFTR), sodium channel protein type 1 subunit alpha (SCN1A), copper-transporting ATPase 2 (ATP7B), potassium voltage-gated channel subfamily KQT member 2 (KCNQ2), sodium channel protein type 2 subunit alpha (SCN2A), voltage-dependent P/Q-type calcium channel subunit alpha-1A (CACNA1A), sodium channel protein type 8 subunit alpha (SCN8A), glutamate receptor ionotropic, NMDA 2A (GRIN2A), sodium- and chloride-dependent GABA transporter 1 (SLC6A1), sodium/potassium-transporting ATPase subunit alpha-2 (ATP1A2), sodium/potassium-transporting ATPase subunit alpha-3 (ATP1A3), sodium channel protein type 9 subunit alpha (SCN9A), gamma-aminobutyric acid receptor subunit beta-3 (GABRB3), and potassium voltage-gated channel subfamily KQT member 3 (KCNQ3).

[0078] In some embodiments, the moiety that specifically binds a membrane protein comprises an antibody, or functional fragment or functional variant thereof.

[0079] In some embodiments, the antibody, or functional fragment or functional variant thereof, comprises a full-length antibody, a single chain variable fragment (scFv), a scFv2, a scFv-Fc, a Fab, a Fab′, a F(ab′)2, a F(v), or a VHH. In some embodiments, the antibody, or functional fragment or functional variant thereof, comprises a VHH.

[0080] In some embodiments, the membrane protein comprises an amino acid sequence at least 90%, 91%, 92%, 93%, 94%, 95%, 96%, 97%, 98%, 99%, or 100% identical to any one of SEQ ID NOS: 228-245.

[0081] In some embodiments, the deubiquitinase is a cysteine protease or a metalloprotease.

[0082] In some embodiments, the deubiquitinase is a cysteine protease. In some embodiments, the cysteine protease is a ubiquitin-specific protease (USP), a ubiquitin C-terminal hydrolase (UCH), a Machado-Josephin domain protease (MJD), an ovarian tumour protease (OTU), a MINDY protease, or a ZUFSP protease.

[0083] In some embodiments, the cysteine protease is a USP. In some embodiments, the USP is selected from the group consisting of USP1, USP2, USP3, USP4, USP5, USP6, USP7, USP8, USP9X, USP9Y, USP10, USP11, USP12, USP13, USP14, USP15, USP16, USP17, USP17L2, USP17L3, USP17L4, USP17L5, USP17L7, USP17L8, USP18, USP19, USP20, USP21, USP22, USP23, USP24, USP25, USP26, USP27X, USP28, USP29, USP30, USP31, USP32, USP33, USP34, USP35, USP36, USP37, USP38, USP39, USP40, USP41, USP42, USP43, USP44, USP45, and USP46.

[0084] In some embodiments, the cysteine protease is a UCH. In some embodiments, the UCH is selected from the group consisting of BAP1, UCHL1, UCHL3, and UCHL5.

[0085] In some embodiments, the cysteine protease is a MJD. In some embodiments, the MJD is selected from the group consisting of ATXN3 and ATXN3L.

[0086] In some embodiments, the cysteine protease is a OTU. In some embodiments, the OTU is selected from the group consisting of OTUB1 and OTUB2.

[0087] In some embodiments, the cysteine protease is a MINDY. In some embodiments, the MINDY is selected from the group consisting of MINDY1, MINDY2, MINDY3, and MINDY4.

[0088] In some embodiments, the cysteine protease is a ZUFSP. In some embodiments, the ZUFSP is ZUP1.

[0089] In some embodiments, the deubiquitinase is a metalloprotease. In some embodiments, the metalloprotease is a Jab1/Mov34/Mpr1 Pad1 N-terminal+(MPN+) (JAMM) domain protease.

[0090] In some embodiments, the deubiquitinase comprises an amino acid sequence at least 80%, 81%, 82%, 83%, 84%, 85%, 86%, 87%, 88%, 89%, 90%, 91%, 92%, 93%, 94%, 95%, 96%, 97%, 98%, 99%, or 100% identical to any one of SEQ ID NOS: 1-112.

[0091] In some embodiments, the catalytic domain comprises a catalytic domain derived from a deubiquitinase at least 80%, 81%, 82%, 83%, 84%, 85%, 86%, 87%, 88%, 89%, 90%, 91%, 92%, 93%, 94%, 95%, 96%, 97%, 98%, 99%, or 100% identical to any one of SEQ ID NOS: 1-112.

[0092] In some embodiments, the catalytic domain comprises an amino acid sequence at least 80%, 81%, 82%, 83%, 84%, 85%, 86%, 87%, 88%, 89%, 90%, 91%, 92%, 93%, 94%, 95%, 96%, 97%, 98%, 99%, or 100% identical to any one of SEQ ID NOS: 113-220.

[0093] In some embodiments, the effector domain is directly fused to the targeting domain.

[0094] In some embodiments, the effector domain is indirectly fused to the targeting domain.

[0095] In some embodiments, the effector domain is indirectly fused to the targeting domain via a peptide linker. In some embodiments, the effector domain is indirectly fused to the targeting domain via a peptide linker of sufficient length such that the effector domain and the targeting domain can simultaneous bind the respective target proteins.

[0096] In some embodiments, the effector domain is fused to the C terminus of the targeting domain. In some embodiments, the effector moiety is fused to the N terminus of the targeting domain.

[0097] In one aspect, provided herein are nucleic acid molecules encoding the fusion protein described herein. In some embodiments, the nucleic acid molecule is a DNA molecule. In some embodiments, the nucleic acid molecule is an RNA molecule.

[0098] In one aspect, provided herein are vectors comprising a nucleic acid molecule described herein. In some embodiments, the vector is a plasmid or a viral vector.

[0099] In one aspect, provided herein are viral particles comprising a nucleic acid described herein.

[0100] In one aspect, described herein is an in vitro cell or population of cells comprising a fusion protein described herein, a nucleic acid molecule described herein, or a vector described herein.

[0101] In one aspect, provided herein are pharmaceutical compositions comprising a fusion protein described herein, a nucleic acid molecule described herein, a vector described herein, or a viral particle described herein, and an excipient.

[0102] In one aspect, provided herein are methods of making a fusion protein described herein, comprising (a) introducing into an in vitro cell or population of cells a nucleic acid described herein, a vector described herein, or a viral particle described herein; (b) culturing the cell or population of cells in a culture medium under conditions suitable for expression of the fusion protein, (c) isolating the fusion protein from the culture medium, and (d) optionally purifying the fusion protein.

[0103] In one aspect, provided herein are methods of treating a disease in a subject comprising administering a fusion protein described herein, a nucleic acid described herein, a vector described herein, or a viral particle described herein, or a pharmaceutical composition described herein, to a subject in need thereof.

[0104] In some embodiments, the subject is human.

[0105] In some embodiments, the disease is associated with decreased expression of a functional version of the membrane protein relative to a non-diseased control.

[0106] In some embodiments, the disease is associated with decreased stability of a functional version of the membrane protein relative to a non-diseased control.

[0107] In some embodiments, the disease is associated with increased ubiquitination and degradation of the membrane protein relative to a non-diseased control.

[0108] In some embodiments, the disease is a genetic disease.

[0109] In some embodiments, the disease is GLUT1 deficiency syndrome, episodic kinesigenic dyskinesia 1, Usher syndrome type 2A, early infantile epileptic encephalopathy type 9, tuberous sclerosis type 2; tuberous sclerosis type 1, a KCNQ2-Related Disorder (e.g., epileptic encephalopathy), Becker Muscular Dystrophy, autosomal Dominant RP, Alagille syndrome 1, and Gillespie Syndrome.

[0110] In some embodiments, the disease is selected from the group consisting of early infantile epileptic encephalopathy type 11, early infantile epileptic encephalopathy type 13, early infantile epileptic encephalopathy type 27, cystic fibrosis, Dravet syndrome, Wilson disease, episodic ataxia type 2; epilepsy (e.g., focal, with speech disorder and with or without mental retardation), myoclonic-atonic epilepsy, alternating hemiplegia of childhood, alternating hemiplegia of childhood type 2, epilepsy type 7, GABRB3 associated epilepsy, and a KCNQ2-Related Disorder (e.g., epileptic encephalopathy).

[0111] In some embodiments, the disease is selected from the group consisting of GRIN2B-Related Disorder, early infantile epileptic encephalopathy type 9, early infantile epileptic encephalopathy type 11, early infantile epileptic encephalopathy type 13, early infantile epileptic encephalopathy type 27, cystic fibrosis, Dravet syndrome, Wilson disease, episodic ataxia type 2; GLUT1 deficiency syndrome, episodic kinesigenic dyskinesia 1, epilepsy (e.g., focal, with speech disorder and with or without mental retardation), myoclonic-atonic epilepsy, Usher syndrome type 2A, alternating hemiplegia of childhood, alternating hemiplegia of childhood type 2, epilepsy type 7, GABRB3 associated epilepsy; tuberous sclerosis type 2; tuberous sclerosis type 1, Becker Muscular Dystrophy, autosomal Dominant RP, Alagille syndrome 1, and Gillespie Syndrome.

[0112] In some embodiments, the disease is a haploinsufficiency disease.

[0113] In some embodiments, the fusion protein is administered at a therapeutically effective dose.

[0114] In some embodiments, the fusion protein is administered systematically or locally.

[0115] In some embodiments, the fusion protein is administered intravenously, subcutaneously, or intramuscularly.

[0116] In one aspect, provided herein are nucleic acid molecules encoding the fusion protein described herein. In some embodiments, the nucleic acid molecule is a DNA molecule. In some embodiments, the nucleic acid molecule is an RNA molecule.

[0117] In one aspect, provided herein are vectors comprising a nucleic acid molecule described herein. In some embodiments, the vector is a plasmid or a viral vector.

[0118] In one aspect, provided herein are viral particles comprising a nucleic acid described herein.

[0119] In one aspect, described herein is an in vitro cell or population of cells comprising a fusion protein described herein, a nucleic acid molecule described herein, or a vector described herein.

[0120] In one aspect, provided herein are pharmaceutical compositions comprising a fusion protein described herein, a nucleic acid molecule described herein, a vector described herein, or a viral particle described herein, and an excipient.

[0121] In one aspect, provided herein are methods of making a fusion protein described herein, comprising (a) introducing into an in vitro cell or population of cells a nucleic acid described herein, a vector described herein, or a viral particle described herein; (b) culturing the cell or population of cells in a culture medium under conditions suitable for expression of the fusion protein, (c) isolating the fusion protein from the culture medium, and (d) optionally purifying the fusion protein.

[0122] In one aspect, provided herein are methods of treating a disease in a subject comprising administering a fusion protein described herein, a nucleic acid described herein, a vector described herein, or a viral particle described herein, or a pharmaceutical composition described herein, to a subject in need thereof.

[0123] In some embodiments, the subject is human.

[0124] In some embodiments, the disease is associated with decreased expression of a functional version of the membrane protein relative to a non-diseased control.

[0125] In some embodiments, the disease is associated with decreased stability of a functional version of the membrane protein relative to a non-diseased control.

[0126] In some embodiments, the disease is associated with increased ubiquitination and degradation of the membrane protein relative to a non-diseased control.

[0127] In some embodiments, the disease is a genetic disease.

[0128] In some embodiments, the disease is early infantile epileptic encephalopathy type 2, Wilson disease, early infantile epileptic encephalopathy type 4, mental retardation autosomal dominant 5, aphasia, alagille syndrome 1, epilepsy, tuberous sclerosis-2, tuberous sclerosis-1, KIF1A-associated neurological disorder, encephalopathy, Phelan-McDermid syndrome, Becker Muscular Dystrophy, RP1, retinitis pigmentosa 1, dilated cardiomyopathy 1G, DYNC1H1 Syndrome, TRIO-Related intellectual disability (ID), and USP9X Development Disorder.

[0129] The method of any one of claims 43-48, wherein the disease is early infantile epileptic encephalopathy type 2, Wilson disease, early infantile epileptic encephalopathy type 4, mental retardation autosomal dominant 5, aphasia primary progressive & FTD (frontotemporal degeneration), alagille syndrome 1, epilepsy familial focal with variable foci 1, tuberous sclerosis-2, tuberous sclerosis-1, KIF1A-associated neurological disorder, encephalopathy, Phelan-McDermid syndrome, Becker Muscular Dystrophy, RP1, retinitis pigmentosa 1, dilated cardiomyopathy 1G, DYNC1H1 Syndrome, TRIO-Related intellectual disability (ID), and USP9X Development Disorder.

[0130] In some embodiments, the disease is a haploinsufficiency disease.

[0131] In some embodiments, the fusion protein is administered at a therapeutically effective dose.

[0132] In some embodiments, the fusion protein is administered systematically or locally.

[0133] In some embodiments, the fusion protein is administered intravenously, subcutaneously, or intramuscularly.

### 4. BRIEF DESCRIPTION OF THE FIGURES

[0134] FIGS. 1A-1D provides a schematic representation of exemplary fusion proteins described herein. FIG. 1A is a schematic of an engineered deubiquitinase comprising from N′ to C′ terminus a VHH that specifically binds a membrane target protein and the catalytic domain of a deubiquitinase. In this specific embodiment, the C-terminus of the VHH is directly connected to the N-terminus of the catalytic domain of the deubiquitinase. FIG. 1B is a schematic of an engineered deubiquitinase comprising from N′ to C′ terminus the catalytic domain of a deubiquitinase that specifically binds a membrane target protein and a VHH that specifically binds a membrane target protein. In this specific embodiment, the C-terminus of the catalytic domain of the deubiquitinase is directly connected to the N-terminus of the VHH. FIG. 1C is a schematic of an engineered deubiquitinase comprising from N′ to C′ terminus a VHH that specifically binds a membrane target protein and the catalytic domain of a deubiquitinase. In this specific embodiment, the C-terminus of the VHH is indirectly connected to the N-terminus of the catalytic domain of the deubiquitinase through a peptide linker. FIG. 1D is a schematic of an engineered deubiquitinase comprising from N′ to C′ terminus the catalytic domain of a deubiquitinase that specifically binds a membrane target protein and a VHH that specifically binds a membrane target protein. In this specific embodiment, the C-terminus of the catalytic domain of the deubiquitinase is indirectly connected to the N-terminus of the VHH through a peptide linker.

[0135] FIG. 2 is a schematic representation of the assay utilized in Example 3, to screen the effect of targeted deubiquitination of different membrane proteins on target protein expression.

[0136] FIG. 3 is a bar graph depicting the fold change in KCNQ1 protein expression relative to control (as indicated).

[0137] FIG. 4 is a bar graph depicting the fold change in SCN1A protein expression relative to control (as indicated).

[0138] FIG. 5 is a bar graph depicting the fold change in GRIN2B protein expression relative to control (as indicated).

[0139] FIG. 6 is a bar graph depicting the fold change in SLC50A1 protein expression relative to control (deubiquitinase without the nanobody targeting the alfa-tag).

[0140] FIG. 7 is a bar graph depicting the fold change in TREM258 protein expression relative to control (deubiquitinase without the nanobody targeting the alfa-tag).

[0141] FIG. 8 is a bar graph depicting the fold change in FSHR protein expression relative to control (deubiquitinase without the nanobody targeting the alfa-tag).

### 5. DETAILED DESCRIPTION

### 5.1 Overview

[0142] Ubiquitination is the process by which ubiquitin ligases mediate the addition of ubiquitin, a 76 amino acid regulatory protein, to a substrate protein. Ubiquitination generally starts by the attachment of a single ubiquitin molecule to a lysine amino acid residue of the substrate protein. Mevissen T. et al. Mechanisms of Deubiquitinase Specificity and Regulation Annual Review of Biochemistry 86:1, 159-192 (2017), the entire contents of which is incorporated by reference herein. These monoubiquitination events are abundant and serve various functions. Ubiquitin itself contains seven lysine residues, all of which can be ubiquitinated resulting in polyubiquitinated proteins. Komander, D. et al. Breaking the chains: structure and function of the deubiquitinases. Nat Rev Mol Cell Biol 10, 550-563 (2009), the entire contents of which is incorporated by reference herein. Mono and polyubiquitination can have multiple effects on the substrate protein, including marking the substrate protein for degradation via the proteasome, altering the protein's cellular location, altering the protein's activity, and/or promoting or preventing normal protein interactions. See e.g., Hershko A. et al. The ubiquitin system. Annu Rev Biochem. 67:425-79 (1998); Nandi D, et al. The ubiquitin-proteasome system. J Biosci. March; 31(1):137-55 (2006), the entire contents of each of which is incorporated by reference herein. The effects of ubiquitination can be reversed or prevented by removing the ubiquitin protein(s) from the substrate protein. The removal of ubiquitin from a substrate protein is mediated by deubiquitinase (DUB) proteins. Id.

[0143] Numerous genetic diseases are associated with or caused by a decrease in the level of expression of a functional membrane protein or the stability of the membrane protein. For example, haploinsufficiency genetic diseases are caused by the presence a single copy of a wild-type allele in heterozygous combination with a loss of function variant allele, wherein the level of functional protein expressed is insufficient to produce the standard phenotype. See e.g., Johnson, A. et al, Causes and effects of haploinsufficiency. Biol Rev, 94: 1774-1785 (2019), the entire contents of which is incorporated by reference herein. Haploinsufficiency can arise from a de novo or inherited loss-of-function mutation in the variant allele, such that it produces little or no functional protein. Other genetic disorders result from the ubiquitination and subsequent degradation of variant but functional proteins, resulting in a decrease in expression of the functional protein.

[0144] The present disclosure provides, inter alia, novel fusion proteins that comprise the catalytic domain (or functional fragment thereof) of a deubiquitinase and a targeting moiety, such as a VHH, that specifically binds to a target membrane protein. In some embodiments, decreased expression of a functional version of the target membrane protein or decreased stability of a functional version of the target membrane protein is associated with a disease phenotype. As such, the fusion proteins described herein are particularly useful in the treatment of genetic diseases characterized by a decrease in the level of expression of a functional target membrane protein or the stability of the target membrane protein. Upon expression of the fusion protein by host cells, the catalytic domain of the deubiquitinase will be specifically targeted to the target membrane protein and deubiquitinated, resulting in increased expression of the target membrane protein, e.g., to a level sufficient to alleviate the disease phenotype.

### 5.2 Definitions

[0145] The section headings used herein are for organizational purposes only and are not to be construed as limiting the subject matter described.

[0146] Unless defined otherwise, all technical and scientific terms used herein have the same meaning as commonly understood by one of ordinary skill in the art to which this disclosure is related. For example, the Concise Dictionary of Biomedicine and Molecular Biology, Juo, Pei-Show, 2nd ed., 2002, CRC Press; The Dictionary of Cell and Molecular Biology, 3rd ed., 1999, Academic Press; and the Oxford Dictionary Of Biochemistry And Molecular Biology, Revised, 2000, Oxford University Press, provide one of skill with a general dictionary of many of the terms used in this disclosure.

[0147] It is to be understood that the foregoing general description and the following detailed description are exemplary and explanatory only and are not restrictive of any subject matter claimed. In this application, the use of the singular includes the plural unless specifically stated otherwise.

[0148] It must be noted that, as used in the specification and the appended claims, the singular forms “a,” “an,” and “the” include plural referents unless the context clearly dictates otherwise. Furthermore, use of the term “including” as well as other forms, such as “include,” “includes,” and “included,” is not limiting.

[0149] It is understood that wherever aspects are described herein with the language “comprising,” otherwise analogous aspects described in terms of “consisting of” and/or “consisting essentially of” are also provided.

[0150] The term “and/or” where used herein is to be taken as specific disclosure of each of the two specified features or components with or without the other. Thus, the term “and/or” as used in a phrase such as “A and/or B” herein is intended to include “A and B,” “A or B,” “A” (alone), and “B” (alone). Likewise, the term “and/or” as used in a phrase such as “A, B, and/or C” is intended to encompass each of the following aspects: A, B, and C; A, B, or C; A or C; A or B; B or C; A and C; A and B; B and C; A (alone); B (alone); and C (alone).

[0151] Units, prefixes, and symbols are denoted in their Système International de Unites (SI) accepted form. Numeric ranges are inclusive of the numbers defining the range. The headings provided herein are not limitations of the various aspects of the disclosure, which can be had by reference to the specification as a whole. Accordingly, the terms defined immediately below are more fully defined by reference to the specification in its entirety.

[0152] As described herein, any concentration range, percentage range, ratio range or integer range is to be understood to include the value of any integer within the recited range and, when appropriate, fractions thereof (such as one tenth and one hundredth of an integer), unless otherwise indicated.

[0153] The terms “about” or “comprising essentially of” refer to a value or composition that is within an acceptable error range for the particular value or composition as determined by one of ordinary skill in the art, which will depend in part on how the value or composition is measured or determined, i.e., the limitations of the measurement system. For example, “about” or “comprising essentially of” can mean within 1 or more than 1 standard deviation per the practice in the art. Alternatively, “about” or “comprising essentially of” can mean a range of up to 20%. Furthermore, particularly with respect to biological systems or processes, the terms can mean up to an order of magnitude or up to 5-fold of a value. When particular values or compositions are provided in the application and claims, unless otherwise stated, the meaning of “about” or “comprising essentially of” should be assumed to be within an acceptable error range for that particular value or composition.

[0154] As used herein, the term “catalytic domain” in reference to a deubiquitinase refers to an amino acid sequence, or a variant thereof, of a deubiquitinase that is capable of mediating deubiquitination of a target protein. The catalytic domain may comprise a naturally occurring amino acid sequence of a deubiquitinase or it may comprise a variant amino acid sequence of a naturally occurring deubiquitinase. The catalytic domain may comprise the minimum amino acid sequence of a deubiquitinase to mediate deubiquitination of a target protein. The catalytic domain may comprise more than the minimum amino acid sequence of a deubiquitinase to mediate deubiquitination of a target protein.

[0155] The terms “polynucleotide” and “nucleic acid sequence” are used interchangeably herein and refer to a polymer of DNA or RNA. The polynucleotide sequence can be single-stranded or double-stranded; contain natural, non-natural, or altered nucleotides; and contain a natural, non-natural, or altered internucleotide linkage, such as a phosphoroamidate linkage or a phosphorothioate linkage, instead of the phosphodiester found between the nucleotides of an unmodified polynucleotide sequence. Polynucleotide sequences include, but are not limited to, all polynucleotide sequences which are obtained by any means available in the art, including, without limitation, recombinant means, e.g., the cloning of polynucleotide sequences from a recombinant library or a cell genome, using ordinary cloning technology and polymerase chain reaction, and the like, and by synthetic means.

[0156] The terms “amino acid sequence” and “polypeptide” are used interchangeably herein and refer to a polymer of amino acids connected by one or more peptide bonds.

[0157] The term “functional variant” as used herein in reference to a protein or polypeptide refers to a protein that comprises at least one amino acid modification (e.g., a substitution, deletion, addition) compared to the amino acid sequence of a reference protein, that retains at least one particular function. In some embodiments, the reference protein is a wild type protein. For example, a functional variant of an IL-2 protein can refer to an IL-2 protein comprising an amino acid substitution as compared to a wild type IL-2 protein that retains the ability to bind the intermediate affinity IL-2 receptor but abrogates the ability of the protein to bind the high affinity IL-2 receptor. Not all functions of the reference wild type protein need be retained by the functional variant of the protein. In some instances, one or more functions are selectively reduced or eliminated.

[0158] The term “functional fragment” as used herein in reference to a protein or polypeptide refers to a fragment of a reference protein that retains at least one particular function. For example, a functional fragment of an anti-HER2 antibody can refer to a fragment of the anti-HER2 antibody that retains the ability to specifically bind the HER2 antigen. Not all functions of the reference protein need be retained by a functional fragment of the protein. In some instances, one or more functions are selectively reduced or eliminated.

[0159] As used herein, the term “modification,” with reference to a polynucleotide sequence, refers to a polynucleotide sequence that comprises at least one substitution, alteration, inversion, addition, or deletion of nucleotide compared to a reference polynucleotide sequence. Modifications can include non-naturally nucleotides. As used herein, the term “modification,” with reference to an amino acid sequence refers to an amino acid sequence that comprises at least one substitution, alteration, inversion, addition, or deletion of an amino acid residue compared to a reference amino acid sequence. Modifications can include the inclusion of non-naturally occurring amino acid residues.

[0160] As used herein, the term “derived from” with reference to an amino acid sequence refers to an amino acid sequence that has at least 80% sequence identity to a reference naturally occurring amino acid sequence. For example, a catalytic domain derived from a naturally occurring deubiquitinase means that the catalytic domain has an amino acid sequence with at least 80% sequence identity to the sequence of the deubiquitinase catalytic domain from which it is derived. The term “derived from” as used herein does not denote any specific process or method for obtaining the amino acid sequence. For example, the amino acid sequence can be chemically or recombinantly synthesized.

[0161] The term “fusion protein” and grammatical equivalents as used herein refers to a protein that comprises an amino acid sequence derived from at least two separate proteins. The amino acid sequence of the at least two separate proteins can be directly connected through a peptide bond; or can be operably connected through an amino acid linker. Therefore, the term fusion protein encompasses embodiments, wherein the amino acid sequence of e.g., Protein A is directly connected to the amino acid sequence of Protein B through a peptide bond (Protein A-Protein B), and embodiments, wherein the amino acid sequence of e.g., Protein A is operably connected to the amino acid sequence of Protein B through an amino acid linker (Protein A-linker-Protein B).

[0162] The term “fuse” and grammatical equivalents thereof as used herein refers to the operable connection of an amino acid sequence derived from one protein to the amino acid sequence derived from different protein. The term fuse encompasses both a direct connection of the two amino acid sequences through a peptide bond, and the indirect connection through an amino acid linker.

[0163] An “isolated antibody” refers to an antibody that is substantially free of other antibodies having different antigenic specificities (e.g., an isolated antibody that binds specifically to HER2 is substantially free of antibodies that bind specifically to antigens other than HER2). An isolated antibody that binds specifically to HER2 may, however, cross-react with other antigens, such as HER2 molecules from different species. Moreover, an isolated antibody may be substantially free of other cellular material and/or chemicals. By comparison, an “isolated” nucleic acid refers to a nucleic acid composition of matter that is markedly different, i.e., has a distinctive chemical identity, nature and utility, from nucleic acids as they exist in nature. For example, an isolated DNA, unlike native DNA, is a freestanding portion of a native DNA and not an integral part of a larger structural complex, the chromosome, found in nature. Further, an isolated DNA, unlike native DNA, can be used as a PCR primer or a hybridization probe for, among other things, measuring gene expression and detecting biomarker genes or mutations for diagnosing disease or predicting the efficacy of a therapeutic. An isolated nucleic acid may also be purified so as to be substantially free of other cellular components or other contaminants, e.g., other cellular nucleic acids or proteins, using standard techniques well known in the art.

[0164] As used herein, the term “antibody” or “antibodies” are used in the broadest sense and encompasses various antibody structures, including but not limited to monoclonal antibodies, polyclonal antibodies, multispecific antibodies (e.g., bispecific antibodies), and antibody fragments so long as they exhibit the desired antigen-binding activity (i.e. antigen binding fragments as defined herein). The term antibody thus includes, for example, include full-length antibodies, antigen-binding fragments of full-length antibodies, molecules comprising antibody CDRs, VH regions, and/or VL regions; and antibody-like scaffolds (e.g., fibronectins). Examples of antibodies include, without limitation, monoclonal antibodies, recombinantly produced antibodies, monospecific antibodies, multispecific antibodies (including bispecific antibodies), human antibodies, humanized antibodies, chimeric antibodies, immunoglobulins, synthetic antibodies, tetrameric antibodies comprising two heavy chain and two light chain molecules, an antibody light chain monomer, an antibody heavy chain monomer, an antibody light chain dimer, an antibody heavy chain dimer, an antibody light chain-antibody heavy chain pair, intrabodies, heteroconjugate antibodies, antibody-drug conjugates, single domain antibodies (e.g., VHH, (VHH)₂), monovalent antibodies, single chain antibodies, single-chain Fvs (scFv; (scFv)₂), camelized antibodies, affybodies, Fab fragments (e.g., Fab, single chain Fab (scFab), F(ab′)₂ fragments, disulfide-linked Fvs (sdFv), anti-idiotypic (anti-Id) antibodies (including, e.g., anti-anti-Id antibodies), diabodies, tribodies, and antibody-like scaffolds (e.g., fibronectins), Fc fusions (e.g., Fab-Fc, scFv-Fc, VHH-Fc, (scFv)₂-Fc, (VHH)₂—Fc, and antigen-binding fragments of any of the above, and conjugates or fusion proteins comprising any of the above. In certain embodiments, antibodies described herein refer to polyclonal antibody populations. In certain embodiments, antibodies described herein refer to monoclonal antibody populations. Antibodies can be of any type (e.g., IgG, IgE, IgM, IgD, IgA or IgY), any class (e.g., IgG₁, IgG₂, IgG₃, IgG₄, IgA₁ or IgA₂), or any subclass (e.g., IgG₂ₐ or IgG_{2b}) of immunoglobulin (Ig) molecule. In certain embodiments, antibodies described herein are IgG antibodies, or a class (e.g., human IgG₁ or IgG₄) or subclass thereof. In a specific embodiment, the antibody is a humanized monoclonal antibody. In another specific embodiment, the antibody is a human monoclonal antibody.

[0165] The term “full-length antibody,” as used herein refers to an antibody having a structure substantially similar to a native antibody structure comprising two heavy chains and two light chains interconnected by disulfide bonds. In some embodiments, the two heavy chains comprise a substantially identical amino acid sequence; and the two light chains comprise a substantially identical amino acid sequence. Antibody chains may be substantially identical but not entirely identical if they differ due to post-translational modifications, such as C-terminal cleavage of lysine residues, alternative glycosylation patterns, etc.

[0166] The terms “antigen binding fragment” and “antigen binding domain” are used interchangeably herein and refer to one or more polypeptides, other than a full-length antibody, that is capable of specifically binding to antigen and comprises a portion of a full-length antibody (e.g., a VH, a VL). Exemplary antigen binding fragments include, but are not limited to, single domain antibodies (e.g., VHH, (VHH)₂), single chain antibodies, single-chain Fvs (scFv; (scFv)₂), camelized antibodies, affybodies, Fab fragments (e.g., Fab, single chain Fab (scFab), F(ab′)₂ fragments, and disulfide-linked Fvs (sdFv). The antigen binding domain can be part of a larger protein, e.g., a full-length antibody.

[0167] The term “(scFv)₂” as used herein refers to an antibody that comprises a first and a second scFv operably connected (e.g., via a linker). The first and second scFv can specifically bind the same or different antigens. In some embodiments, the first and second scFv are operably connected by an amino via an amino acid linker.

[0168] The term “(VHH)₂” as used herein refers to an antibody that comprises a first and a second VHH operably connected (e.g., via a linker). The first and the second VHH can specifically bind the same or different antigens. In some embodiments, the first and second VHH are operably connected by an amino via an amino acid linker.

[0169] The term “Fab-Fc” as used herein refers to an antibody that comprises a Fab operably linked to an Fc domain or a subunit of an Fc domain. A full-length antibody described herein comprises two Fabs, one Fab operably connected to one Fc domain and the other Fab operably connected to a second Fc domain.

[0170] The term “scFv-Fc” as used herein refers to an antibody that comprises a scFv operably linked to an Fc domain or subunit of an Fc domain.

[0171] The term “VHH-Fc” as used herein refers to an antibody that comprises a VHH operably linked to an Fc domain or a subunit of an Fc domain.

[0172] The term “(scFv)₂-Fc” as used herein refers to a (scFv)₂ operably linked to an Fc domain or a subunit of an Fc domain.

[0173] The term “(VHH)₂—Fc” as used herein refers to (VHH)₂ operably linked to an Fc domain or a subunit of an Fc domain.

[0174] “Antibody-like scaffolds” are known in the art, for example, fibronectin and designed ankyrin repeat proteins (DARPins) have been used as alternative scaffolds for antigen-binding domains, see, e.g., Gebauer and Skerra, Engineered protein scaffolds as next-generation antibody therapeutics. Curr Opin Chem Biol 13:245-255 (2009) and Stumpp et al., Darpins: A new generation of protein therapeutics. Drug Discovery Today 13: 695-701 (2008). Exemplary antibody-like scaffold proteins include, but are not limited to, lipocalins (Anticalin), Protein A-derived molecules such as Z-domains of Protein A (Affibody), an A-domain (Avimer/Maxibody), a serum transferrin (trans-body); a designed ankyrin repeat protein (DARPin), VNAR fragments, a fibronectin (AdNectin), a C-type lectin domain (Tetranectin); a variable domain of a new antigen receptor beta-lactamase (VNAR fragments), a human gamma-crystallin or ubiquitin (Affilin molecules); a kunitz type domain of human protease inhibitors, microbodies such as the proteins from the knottin family, peptide aptamers and fibronectin (adnectin).

[0175] As used herein, the term “CDR” or “complementarity determining region” means the noncontiguous antigen combining sites found within the variable region of both heavy and light chain polypeptides. These particular regions have been described by Kabat et al., J. Biol. Chem. 252, 6609-6616 (1977) and Kabat et al., Sequences of protein of immunological interest. (1991), all of which are herein incorporated by reference in their entireties. Unless otherwise specified, the term “CDR” is a CDR as defined by Kabat et al., J. Biol. Chem. 252, 6609-6616 (1977) and Kabat et al., Sequences of protein of immunological interest. (1991).

[0176] As used herein, the term “framework (FR) amino acid residues” refers to those amino acids in the framework region of an antibody variable region. The term “framework region” or “FR region” as used herein, includes the amino acid residues that are part of the variable region, but are not part of the CDRs (e.g., using the Kabat definition of CDRs).

[0177] As used herein, the term “heavy chain” when used in reference to an antibody can refer to any distinct type, e.g., alpha (α), delta (δ), epsilon (γ), gamma (γ), and mu (μ), based on the amino acid sequence of the constant domain, which give rise to IgA, IgD, IgE, IgG, and IgM classes of antibodies, respectively, including subclasses of IgG, e.g., IgG₁, IgG₂, IgG₃, and IgG₄.

[0178] As used herein, the term “light chain” when used in reference to an antibody can refer to any distinct type, e.g., kappa (κ) or lambda (λ) based on the amino acid sequence of the constant domains. Light chain amino acid sequences are well known in the art. In specific embodiments, the light chain is a human light chain.

[0179] As used herein, the terms “variable region” refers to a portion of an antibody, generally, a portion of a light or heavy chain, typically about the amino-terminal 110 to 120 amino acids or 110 to 125 amino acids in the mature heavy chain and about 90 to 115 amino acids in the mature light chain, which differ extensively in sequence among antibodies and are used in the binding and specificity of a particular antibody for its particular antigen. The variability in sequence is concentrated in those regions called complementarity determining regions (CDRs) while the more highly conserved regions in the variable domain are called framework regions (FR). Without wishing to be bound by any particular mechanism or theory, it is believed that the CDRs of the light and heavy chains are primarily responsible for the interaction and specificity of the antibody with antigen. In certain embodiments, the variable region is a human variable region. In certain embodiments, the variable region comprises rodent or murine CDRs and human framework regions (FRs). In particular embodiments, the variable region is a primate (e.g., non-human primate) variable region. In certain embodiments, the variable region comprises rodent or murine CDRs and primate (e.g., non-human primate) framework regions (FRs).

[0180] The terms “VL” and “VL domain” are used interchangeably to refer to the light chain variable region of an antibody.

[0181] The terms “VH” and “VH domain” are used interchangeably to refer to the heavy chain variable region of an antibody.

[0182] As used herein, the terms “constant region” and “constant domain” are interchangeable and are common in the art. The constant region is an antibody portion, e.g., a carboxyl terminal portion of a light and/or heavy chain which is not directly involved in binding of an antibody to antigen but which can exhibit various effector functions, such as interaction with an Fc receptor (e.g., Fc gamma receptor). The constant region of an immunoglobulin (Ig) molecule generally has a more conserved amino acid sequence relative to an immunoglobulin (Ig) variable domain.

[0183] The term “Fc region” as used herein refers to the C-terminal region of an immunoglobulin (Ig) heavy chain that comprises from N- to C-terminus at least a CH2 domain operably connected to a CH3 domain. In some embodiments, the Fc region comprises an immunoglobulin (Ig) hinge region operably connected to the N-terminus of the CH2 domain. Examples of proteins with engineered Fc regions can be found in Saunders 2019 (K. O. Saunders, “Conceptual Approaches to Modulating Antibody Effector Functions and Circulation Half-Life,” 2019, Frontiers in Immunology, V. 10, Art. 1296, pp. 1-20, which is incorporated by reference herein).

[0184] As used herein, the term “EU numbering system” refers to the EU numbering convention for the constant regions of an antibody, as described in Edelman, G. M. et al., Proc. Natl. Acad. USA, 63, 78-85 (1969) and Kabat et al, Sequences of Proteins of Immunological Interest, U.S. Dept. Health and Human Services, 5th edition, 1991, each of which is herein incorporated by reference in its entirety.

[0185] As used herein, the term “Kabat numbering system” refers to the Kabat numbering convention for variable regions of an antibody, see e.g., Kabat et al, Sequences of Proteins of Immunological Interest, U.S. Dept. Health and Human Services, 5th edition, 1991. Unless otherwise noted, numbering of the variable regions of an antibody are denoted according to the Kabat numbering system.

[0186] As used herein, the terms “specifically binds,” refers to molecules that bind to an antigen (e.g., epitope or immune complex) as such binding is understood by one skilled in the art. For example, a molecule that specifically binds to an antigen can bind to other peptides or polypeptides, generally with lower affinity as determined by, e.g., immunoassays, BIAcore®, KinExA 3000 instrument (Sapidyne Instruments, Boise, ID), or other assays known in the art. In a specific embodiment, molecules that specifically bind to an antigen bind to the antigen with a K_{A} that is at least 2 logs (e.g., factors of 10), 2.5 logs, 3 logs, 4 logs or greater than the K_{A} when the molecules bind non-specifically to another antigen. The skilled worker will appreciate that an antibody, as described herein, can specifically bind to more than one antigen (e.g., via different regions of the antibody molecule). The term specifically binds includes molecules that are cross reactive with the same antigen of a different species. For example, an antigen binding domain that specifically binds human CD20 may be cross reactive with CD20 of another species (e.g., cynomolgus monkey, or murine), and still be considered herein to specifically bind human CD20.

[0187] “Affinity” refers to the strength of the sum total of non-covalent interactions between a single binding site of a molecule (e.g., a receptor) and its binding partner (e.g., a ligand). Unless indicated otherwise, as used herein, “binding affinity” refers to intrinsic binding affinity, which reflects a 1:1 interaction between members of a binding pair (e.g., an antigen binding moiety and an antigen, or a receptor and its ligand). The affinity of a molecule X for its partner Y can generally be represented by the dissociation constant (KD), which is the ratio of dissociation and association rate constants (koff and kon, respectively). Thus, equivalent affinities may comprise different rate constants, as long as the ratio of the rate constants remains the same. Affinity can be measured by well-established methods known in the art, including those described herein. A particular method for measuring affinity is Surface Plasmon Resonance (SPR).

[0188] The determination of “percent identity” between two sequences (e.g., amino acid sequences or nucleic acid sequences) can be accomplished using a mathematical algorithm. Identity measures the percent of identical matches between the smaller of two or more sequences with gap alignments (if any) addressed by a particular mathematical model or computer program (i.e., “algorithms”). A specific, non-limiting example of a mathematical algorithm utilized for the comparison of two sequences is the algorithm of Karlin S & Altschul S F (1990) PNAS 87: 2264-2268, modified as in Karlin S & Altschul S F (1993) PNAS 90: 5873-5877, each of which is herein incorporated by reference in its entirety. Such an algorithm is incorporated into the BLASTN, BLASTP, BLASTX programs of Altschul S F et al., (1990) J Mol Biol 215: 403, which is herein incorporated by reference in its entirety. BLAST nucleotide searches can be performed with the NBLAST nucleotide program parameters set, e.g., for score=100, wordlength=12 to obtain nucleotide sequences homologous to a nucleic acid molecule described herein. BLAST protein searches can be performed with the BLASTP program parameters set, e.g., default settings; to obtain amino acid sequences homologous to a protein molecule described herein. To obtain gapped alignments for comparison purposes, Gapped BLAST can be utilized as described in Altschul S F et al., (1997) Nuc Acids Res 25: 3389-3402, which is herein incorporated by reference in its entirety. Alternatively, PSI BLAST can be used to perform an iterated search which detects distant relationships between molecules (Id.). When utilizing BLAST, Gapped BLAST, and PSI Blast programs, the default parameters of the respective programs (e.g., of BLASTP and BLASTN) can be used (see, e.g., National Center for Biotechnology Information (NCBI) on the worldwide web, ncbi.nlm.nih.gov). Another specific, non-limiting example of a mathematical algorithm utilized for the comparison of sequences is the algorithm of Myers and Miller, 1988, CABIOS 4:11-17, which is herein incorporated by reference in its entirety. Such an algorithm is incorporated in the ALIGN program (version 2.0) which is part of the GCG sequence alignment software package. When utilizing the ALIGN program for comparing amino acid sequences, a PAM120 weight residue table, a gap length penalty of 12, and a gap penalty of 4 can be used. The percent identity between two sequences can be determined using techniques similar to those described above, with or without allowing gaps. In calculating percent identity, typically only exact matches are counted. As described above, the percent identity is based on the amino acid matches between the smaller of two proteins. Therefore, for example, using NCBI Basic Local Alignment Tool-BLASTP program on the default settings (Search Parameters: word size 3, expect value 0.05, hitlist 100, Gapcosts 11,1; Matrix BLOSUM62, Filter string: F; Genetic Code: 1; Window Size: 40; Threshold: 11; Composition Based Stats: 2; Karlin-Altschul Statistics: Lambda: 0.31293; 0.267; K: 0.132922; 0.041; H: 0.401809; 0.14; and Relative Statistics: Effective search space: 288906); the percent identity between SEQ ID NO: 80 and SEQ ID NO: 293 is 100% identity.

[0189] As used herein, the term “operably connected” refers to a linkage of polynucleotide sequence elements or amino acid sequence elements in a functional relationship. For example, a polynucleotide sequence is operably connected when it is placed into a functional relationship with another polynucleotide sequence. In some embodiments, a transcription regulatory polynucleotide sequence e.g., a promoter, enhancer, or other expression control element is operably-linked to a polynucleotide sequence that encodes a protein if it affects the transcription of the polynucleotide sequence that encodes the protein.

[0190] The terms “subject” and “patient” are used interchangeably herein and include any human or nonhuman animal. The term “nonhuman animal” includes, but is not limited to, vertebrates such as nonhuman primates, sheep, dogs, and rodents such as mice, rats and guinea pigs. In some embodiments, the subject is a human.

[0191] As used herein, the term “administering” refers to the physical introduction of a therapeutic agent (or a precursor of the therapeutic agent that is metabolized or altered within the body of the subject to produce the therapeutic agent in vivo) to a subject, using any of the various methods and delivery systems known to those skilled in the art. Exemplary routes of include intravenous, intramuscular, subcutaneous, intraperitoneal, spinal or other parenteral routes of administration, for example by injection or infusion. The term “parenteral administration” as used herein means modes of administration other than enteral and topical administration, usually by injection, and includes, without limitation, intravenous, intramuscular, intraarterial, intrathecal, intralymphatic, intralesional, intracapsular, intraorbital, intracardiac, intradermal, intraperitoneal, transtracheal, subcutaneous, subcuticular, intraarticular, subcapsular, subarachnoid, intraspinal, epidural and intrasternal injection and infusion, as well as in vivo electroporation. A therapeutic agent may be administered via a non-parenteral route, or orally. Other non-parenteral routes include a topical, epidermal or mucosal route of administration, for example, intranasally, vaginally, rectally, sublingually or topically. Administering can also be performed, for example, once, a plurality of times, and/or over one or more extended periods.

[0192] A “therapeutically effective amount” or “therapeutically effective dose” of a drug or therapeutic agent is any amount of the drug that, when used alone or in combination with another therapeutic agent, protects a subject against the onset of a disease or promotes disease regression evidenced by a decrease in severity of disease symptoms, an increase in frequency and duration of disease symptom-free periods, or a prevention of impairment or disability due to the disease affliction. The ability of a therapeutic agent to promote disease regression can be evaluated using a variety of methods known to the skilled practitioner, such as in human subjects during clinical trials, in animal model systems predictive of efficacy in humans, or by assaying the activity of the agent in in vitro assays.

[0193] The terms “disease,” “disorder,” and “syndrome” are used interchangeably herein.

[0194] As used herein, the terms “treat,” treating,” “treatment,” and the like refer to reducing or ameliorating a disease and/or symptom(s) associated therewith or obtaining a desired pharmacologic and/or physiologic effect. It will be appreciated that, although not precluded, treating a disease does not require that the disease or symptoms associated therewith be completely eliminated. In some embodiments, the effect is therapeutic, i.e., without limitation, the effect partially or completely reduces, diminishes, abrogates, abates, alleviates, decreases the intensity of, or cures a disease and/or adverse symptom attributable to the disease. In some embodiments, the effect is preventative, i.e., the effect protects or prevents an occurrence or reoccurrence of a disease. To this end, the presently disclosed methods comprise administering a therapeutically effective amount of a compositions as described herein.

### 5.3 Fusion Proteins

[0195] In certain aspects, provided herein are fusion proteins that comprise an effector domain comprising a catalytic domain of a deubiquitinase, or a functional fragment or functional variant thereof; and a targeting domain comprising a moiety that specifically binds a target cytosolic protein.

### 5.3.1 Effector Domain

[0196] In some embodiments, the effector domain comprises a catalytic domain of a deubiquitinase, or a functional fragment or functional variant thereof. In some embodiments, the deubiquitinase is human. In some embodiments, the catalytic domain is derived from a naturally occurring deubiquitinase (e.g., a naturally occurring human deubiquitinase).

[0197] In some embodiments, the amino acid sequence of the effector domain comprises the amino acid sequence of a full length deubiquitinase. In some embodiments, the amino acid sequence of the effector domain comprises the amino acid sequence of a catalytic domain of a deubiquitinase and an additional amino acid sequence at the N-terminal, C-terminal, or N-terminal and C-terminal end of the catalytic domain.

[0198] In some embodiments, the catalytic domain comprises a naturally occurring amino acid sequence of a deubiquitinase. In some embodiments, the catalytic domain comprises a variant of a naturally occurring deubiquitinase. In some embodiments, the amino acid sequence of the catalytic domain of the fusion protein is at least 80%, 81%, 82%, 83%, 84%, 85%, 86%, 87%, 88%, 89%, 90%, 91%, 92%, 93%, 94%, 95%, 96%, 97%, 98%, 99%, or 100% identical to the amino acid sequence of the catalytic domain of a naturally occurring deubiquitinase. In some embodiments, the amino acid sequence of the catalytic domain of the fusion protein comprises 1, 2, 3, 4, 5, 6, 7, 8, 9, 10, 15, or 20 amino acid modifications compared to the amino acid sequence of the catalytic domain of a naturally occurring deubiquitinase.

[0199] In some embodiments, the catalytic domain comprises the minimum amino acid sequence of a naturally occurring deubiquitinase sufficient to mediate deubiquitination of a target protein. In some embodiments, the catalytic domain comprises more than the minimum amino acid sequence of a naturally occurring deubiquitinase sufficient to mediate deubiquitination of a target protein.

[0200] In some embodiments, the deubiquitinase is a cysteine protease or a metalloprotease. In some embodiments, the deubiquitinase is a cysteine protease. In some embodiments, the deubiquitinase is a metalloprotease. In some embodiments, the deubiquitinase is a ubiquitin-specific protease (USP), a ubiquitin C-terminal hydrolase (UCH), a Machado-Josephin domain protease (MJD), an ovarian tumor protease (OTU), a MINDY protease, or a ZUFSP protease.

[0201] Exemplary deubiquitinases include, but are not limited to, USP1, USP2, USP3, USP4, USP5, USP6, USP7, USP8, USP9X, USP9Y, USP10, USP11, USP12, USP13, USP14, USP15, USP16, USP17, USP17L2, USP17L3, USP17L4, USP17L5, USP17L7, USP17L8, USP18, USP19, USP20, USP21, USP22, USP23, USP24, USP25, USP26, USP27X, USP28, USP29, USP30, USP31, USP32, USP33, USP34, USP35, USP36, USP37, USP38, USP39, USP40, USP41, USP42, USP43, USP44, USP45, USP46, BAP1, UCHL1, UCHL3, UCHL5, ATXN3, ATXN3L, OTUB1, OTUB2, MINDY1, MINDY2, MINDY3, MINDY4, and ZUP1. Exemplary deubiquitinases for use in the present disclosure are also disclosed in Komander, D. et al. Breaking the chains: structure and function of the deubiquitinases. Nat Rev Mol Cell Biol 10, 550-563 (2009), the entire contents of which is incorporated by reference herein.

[0202] In some embodiments, the deubiquitinase is selected from the group consisting of USP1, USP2, USP3, USP4, USP5, USP6, USP7, USP8, USP9X, USP9Y, USP10, USP11, USP12, USP13, USP14, USP15, USP16, USP17, USP17L2, USP17L3, USP17L4, USP17L5, USP17L7, USP17L8, USP18, USP19, USP20, USP21, USP22, USP23, USP24, USP25, USP26, USP27X, USP28, USP29, USP30, USP31, USP32, USP33, USP34, USP35, USP36, USP37, USP38, USP39, USP40, USP41, USP42, USP43, USP44, USP45, and USP46.

[0203] In some embodiments, the deubiquitinase is BAP1, UCHL1, UCHL3, or UCHL5. In some embodiments, the deubiquitinase is ATXN3 or ATXN3L. In some embodiments, the deubiquitinase is OTUB1 or OTUB2. In some embodiments, the deubiquitinase is MINDY1, MINDY2, MINDY3, or MINDY4. In some embodiments, the deubiquitinase is ZUP1. In some embodiments, the deubiquitinase is a Jab1/Mov34/Mpr1 Pad1 N-terminal+(MPN+) (JAMM) domain protease.

[0204] In some embodiments, the deubiquitinase is a deubiquitinase described in Table 1. In some embodiments, the amino acid sequence of the deubiquitinase comprises an amino acid sequence at least 80%, 81%, 82%, 83%, 84%, 85%, 86%, 87%, 88%, 89%, 90%, 91%, 92%, 93%, 94%, 95%, 96%, 97%, 98%, 99%, or 100% identical to the amino acid sequence of a deubiquitinase in Table 1. In some embodiments, the amino acid sequence of the effector domain comprises an amino acid sequence at least 80%, 81%, 82%, 83%, 84%, 85%, 86%, 87%, 88%, 89%, 90%, 91%, 92%, 93%, 94%, 95%, 96%, 97%, 98%, 99%, or 100% identical to a catalytic domain of a deubiquitinase in Table 1. In some embodiments, the effector domain comprises a functional fragment of a deubiquitinase in Table 1. In some embodiments, the effector domain deubiquitinase comprises a functional variant of deubiquitinase in Table 1. In some embodiments, the catalytic domain comprises a functional fragment of a catalytic domain of a deubiquitinase in Table 1. In some embodiments, the catalytic domain comprises a functional variant of a catalytic domain of a deubiquitinase in Table 1.

[0205] In some embodiments, the deubiquitinase comprises an amino acid sequence at least 80%, 81%, 82%, 83%, 84%, 85%, 86%, 87%, 88%, 89%, 90%, 91%, 92%, 93%, 94%, 95%, 96%, 97%, 98%, 99%, or 100% identical any one of SEQ ID NOS: 1-112. In some embodiments, the deubiquitinase consists of an amino acid sequence at least 80%, 81%, 82%, 83%, 84%, 85%, 86%, 87%, 88%, 89%, 90%, 91%, 92%, 93%, 94%, 95%, 96%, 97%, 98%, 99%, or 100% identical any one of SEQ ID NOS: 1-112.

[0206] In some embodiments, the deubiquitinase comprises an amino acid sequence at least 80%, 81%, 82%, 83%, 84%, 85%, 86%, 87%, 88%, 89%, 90%, 91%, 92%, 93%, 94%, 95%, 96%, 97%, 98%, 99%, or 100% identical to SEQ ID NO: 1. In some embodiments, the deubiquitinase comprises an amino acid sequence at least 80%, 81%, 82%, 83%, 84%, 85%, 86%, 87%, 88%, 89%, 90%, 91%, 92%, 93%, 94%, 95%, 96%, 97%, 98%, 99%, or 100% identical to SEQ ID NO: 2. In some embodiments, the deubiquitinase comprises an amino acid sequence at least 80%, 81%, 82%, 83%, 84%, 85%, 86%, 87%, 88%, 89%, 90%, 91%, 92%, 93%, 94%, 95%, 96%, 97%, 98%, 99%, or 100% identical to SEQ ID NO: 3. In some embodiments, the deubiquitinase comprises an amino acid sequence at least 80%, 81%, 82%, 83%, 84%, 85%, 86%, 87%, 88%, 89%, 90%, 91%, 92%, 93%, 94%, 95%, 96%, 97%, 98%, 99%, or 100% identical to SEQ ID NO: 4. In some embodiments, the deubiquitinase comprises an amino acid sequence at least 80%, 81%, 82%, 83%, 84%, 85%, 86%, 87%, 88%, 89%, 90%, 91%, 92%, 93%, 94%, 95%, 96%, 97%, 98%, 99%, or 100% identical to SEQ ID NO: 5. In some embodiments, the deubiquitinase comprises an amino acid sequence at least 80%, 81%, 82%, 83%, 84%, 85%, 86%, 87%, 88%, 89%, 90%, 91%, 92%, 93%, 94%, 95%, 96%, 97%, 98%, 99%, or 100% identical to SEQ ID NO: 6. In some embodiments, the deubiquitinase comprises an amino acid sequence at least 80%, 81%, 82%, 83%, 84%, 85%, 86%, 87%, 88%, 89%, 90%, 91%, 92%, 93%, 94%, 95%, 96%, 97%, 98%, 99%, or 100% identical to SEQ ID NO: 7. In some embodiments, the deubiquitinase comprises an amino acid sequence at least 80%, 81%, 82%, 83%, 84%, 85%, 86%, 87%, 88%, 89%, 90%, 91%, 92%, 93%, 94%, 95%, 96%, 97%, 98%, 99%, or 100% identical to SEQ ID NO: 8. In some embodiments, the deubiquitinase comprises an amino acid sequence at least 80%, 81%, 82%, 83%, 84%, 85%, 86%, 87%, 88%, 89%, 90%, 91%, 92%, 93%, 94%, 95%, 96%, 97%, 98%, 99%, or 100% identical to SEQ ID NO: 9. In some embodiments, the deubiquitinase comprises an amino acid sequence at least 80%, 81%, 82%, 83%, 84%, 85%, 86%, 87%, 88%, 89%, 90%, 91%, 92%, 93%, 94%, 95%, 96%, 97%, 98%, 99%, or 100% identical to SEQ ID NO: 10. In some embodiments, the deubiquitinase comprises an amino acid sequence at least 80%, 81%, 82%, 83%, 84%, 85%, 86%, 87%, 88%, 89%, 90%, 91%, 92%, 93%, 94%, 95%, 96%, 97%, 98%, 99%, or 100% identical to SEQ ID NO: 11. In some embodiments, the deubiquitinase comprises an amino acid sequence at least 80%, 81%, 82%, 83%, 84%, 85%, 86%, 87%, 88%, 89%, 90%, 91%, 92%, 93%, 94%, 95%, 96%, 97%, 98%, 99%, or 100% identical to SEQ ID NO: 12. In some embodiments, the deubiquitinase comprises an amino acid sequence at least 80%, 81%, 82%, 83%, 84%, 85%, 86%, 87%, 88%, 89%, 90%, 91%, 92%, 93%, 94%, 95%, 96%, 97%, 98%, 99%, or 100% identical to SEQ ID NO: 13. In some embodiments, the deubiquitinase comprises an amino acid sequence at least 80%, 81%, 82%, 83%, 84%, 85%, 86%, 87%, 88%, 89%, 90%, 91%, 92%, 93%, 94%, 95%, 96%, 97%, 98%, 99%, or 100% identical to SEQ ID NO: 14. In some embodiments, the deubiquitinase comprises an amino acid sequence at least 80%, 81%, 82%, 83%, 84%, 85%, 86%, 87%, 88%, 89%, 90%, 91%, 92%, 93%, 94%, 95%, 96%, 97%, 98%, 99%, or 100% identical to SEQ ID NO: 15. In some embodiments, the deubiquitinase comprises an amino acid sequence at least 80%, 81%, 82%, 83%, 84%, 85%, 86%, 87%, 88%, 89%, 90%, 91%, 92%, 93%, 94%, 95%, 96%, 97%, 98%, 99%, or 100% identical to SEQ ID NO: 16. In some embodiments, the deubiquitinase comprises an amino acid sequence at least 80%, 81%, 82%, 83%, 84%, 85%, 86%, 87%, 88%, 89%, 90%, 91%, 92%, 93%, 94%, 95%, 96%, 97%, 98%, 99%, or 100% identical to SEQ ID NO: 17. In some embodiments, the deubiquitinase comprises an amino acid sequence at least 80%, 81%, 82%, 83%, 84%, 85%, 86%, 87%, 88%, 89%, 90%, 91%, 92%, 93%, 94%, 95%, 96%, 97%, 98%, 99%, or 100% identical to SEQ ID NO: 18. In some embodiments, the deubiquitinase comprises an amino acid sequence at least 80%, 81%, 82%, 83%, 84%, 85%, 86%, 87%, 88%, 89%, 90%, 91%, 92%, 93%, 94%, 95%, 96%, 97%, 98%, 99%, or 100% identical to SEQ ID NO: 19. In some embodiments, the deubiquitinase comprises an amino acid sequence at least 80%, 81%, 82%, 83%, 84%, 85%, 86%, 87%, 88%, 89%, 90%, 91%, 92%, 93%, 94%, 95%, 96%, 97%, 98%, 99%, or 100% identical to SEQ ID NO: 20. In some embodiments, the deubiquitinase comprises an amino acid sequence at least 80%, 81%, 82%, 83%, 84%, 85%, 86%, 87%, 88%, 89%, 90%, 91%, 92%, 93%, 94%, 95%, 96%, 97%, 98%, 99%, or 100% identical to SEQ ID NO: 21. In some embodiments, the deubiquitinase comprises an amino acid sequence at least 80%, 81%, 82%, 83%, 84%, 85%, 86%, 87%, 88%, 89%, 90%, 91%, 92%, 93%, 94%, 95%, 96%, 97%, 98%, 99%, or 100% identical to SEQ ID NO: 22. In some embodiments, the deubiquitinase comprises an amino acid sequence at least 80%, 81%, 82%, 83%, 84%, 85%, 86%, 87%, 88%, 89%, 90%, 91%, 92%, 93%, 94%, 95%, 96%, 97%, 98%, 99%, or 100% identical to SEQ ID NO: 23. In some embodiments, the deubiquitinase comprises an amino acid sequence at least 80%, 81%, 82%, 83%, 84%, 85%, 86%, 87%, 88%, 89%, 90%, 91%, 92%, 93%, 94%, 95%, 96%, 97%, 98%, 99%, or 100% identical to SEQ ID NO: 24. In some embodiments, the deubiquitinase comprises an amino acid sequence at least 80%, 81%, 82%, 83%, 84%, 85%, 86%, 87%, 88%, 89%, 90%, 91%, 92%, 93%, 94%, 95%, 96%, 97%, 98%, 99%, or 100% identical to SEQ ID NO: 25. In some embodiments, the deubiquitinase comprises an amino acid sequence at least 80%, 81%, 82%, 83%, 84%, 85%, 86%, 87%, 88%, 89%, 90%, 91%, 92%, 93%, 94%, 95%, 96%, 97%, 98%, 99%, or 100% identical to SEQ ID NO: 26. In some embodiments, the deubiquitinase comprises an amino acid sequence at least 80%, 81%, 82%, 83%, 84%, 85%, 86%, 87%, 88%, 89%, 90%, 91%, 92%, 93%, 94%, 95%, 96%, 97%, 98%, 99%, or 100% identical to SEQ ID NO: 27. In some embodiments, the deubiquitinase comprises an amino acid sequence at least 80%, 81%, 82%, 83%, 84%, 85%, 86%, 87%, 88%, 89%, 90%, 91%, 92%, 93%, 94%, 95%, 96%, 97%, 98%, 99%, or 100% identical to SEQ ID NO: 28. In some embodiments, the deubiquitinase comprises an amino acid sequence at least 80%, 81%, 82%, 83%, 84%, 85%, 86%, 87%, 88%, 89%, 90%, 91%, 92%, 93%, 94%, 95%, 96%, 97%, 98%, 99%, or 100% identical to SEQ ID NO: 29. In some embodiments, the deubiquitinase comprises an amino acid sequence at least 80%, 81%, 82%, 83%, 84%, 85%, 86%, 87%, 88%, 89%, 90%, 91%, 92%, 93%, 94%, 95%, 96%, 97%, 98%, 99%, or 100% identical to SEQ ID NO: 30. In some embodiments, the deubiquitinase comprises an amino acid sequence at least 80%, 81%, 82%, 83%, 84%, 85%, 86%, 87%, 88%, 89%, 90%, 91%, 92%, 93%, 94%, 95%, 96%, 97%, 98%, 99%, or 100% identical to SEQ ID NO: 31. In some embodiments, the deubiquitinase comprises an amino acid sequence at least 80%, 81%, 82%, 83%, 84%, 85%, 86%, 87%, 88%, 89%, 90%, 91%, 92%, 93%, 94%, 95%, 96%, 97%, 98%, 99%, or 100% identical to SEQ ID NO: 32. In some embodiments, the deubiquitinase comprises an amino acid sequence at least 80%, 81%, 82%, 83%, 84%, 85%, 86%, 87%, 88%, 89%, 90%, 91%, 92%, 93%, 94%, 95%, 96%, 97%, 98%, 99%, or 100% identical to SEQ ID NO: 33. In some embodiments, the deubiquitinase comprises an amino acid sequence at least 80%, 81%, 82%, 83%, 84%, 85%, 86%, 87%, 88%, 89%, 90%, 91%, 92%, 93%, 94%, 95%, 96%, 97%, 98%, 99%, or 100% identical to SEQ ID NO: 34. In some embodiments, the deubiquitinase comprises an amino acid sequence at least 80%, 81%, 82%, 83%, 84%, 85%, 86%, 87%, 88%, 89%, 90%, 91%, 92%, 93%, 94%, 95%, 96%, 97%, 98%, 99%, or 100% identical to SEQ ID NO: 35. In some embodiments, the deubiquitinase comprises an amino acid sequence at least 80%, 81%, 82%, 83%, 84%, 85%, 86%, 87%, 88%, 89%, 90%, 91%, 92%, 93%, 94%, 95%, 96%, 97%, 98%, 99%, or 100% identical to SEQ ID NO: 36. In some embodiments, the deubiquitinase comprises an amino acid sequence at least 80%, 81%, 82%, 83%, 84%, 85%, 86%, 87%, 88%, 89%, 90%, 91%, 92%, 93%, 94%, 95%, 96%, 97%, 98%, 99%, or 100% identical to SEQ ID NO: 37. In some embodiments, the deubiquitinase comprises an amino acid sequence at least 80%, 81%, 82%, 83%, 84%, 85%, 86%, 87%, 88%, 89%, 90%, 91%, 92%, 93%, 94%, 95%, 96%, 97%, 98%, 99%, or 100% identical to SEQ ID NO: 38. In some embodiments, the deubiquitinase comprises an amino acid sequence at least 80%, 81%, 82%, 83%, 84%, 85%, 86%, 87%, 88%, 89%, 90%, 91%, 92%, 93%, 94%, 95%, 96%, 97%, 98%, 99%, or 100% identical to SEQ ID NO: 39. In some embodiments, the deubiquitinase comprises an amino acid sequence at least 80%, 81%, 82%, 83%, 84%, 85%, 86%, 87%, 88%, 89%, 90%, 91%, 92%, 93%, 94%, 95%, 96%, 97%, 98%, 99%, or 100% identical to SEQ ID NO: 40. In some embodiments, the deubiquitinase comprises an amino acid sequence at least 80%, 81%, 82%, 83%, 84%, 85%, 86%, 87%, 88%, 89%, 90%, 91%, 92%, 93%, 94%, 95%, 96%, 97%, 98%, 99%, or 100% identical to SEQ ID NO: 41. In some embodiments, the deubiquitinase comprises an amino acid sequence at least 80%, 81%, 82%, 83%, 84%, 85%, 86%, 87%, 88%, 89%, 90%, 91%, 92%, 93%, 94%, 95%, 96%, 97%, 98%, 99%, or 100% identical to SEQ ID NO: 42. In some embodiments, the deubiquitinase comprises an amino acid sequence at least 80%, 81%, 82%, 83%, 84%, 85%, 86%, 87%, 88%, 89%, 90%, 91%, 92%, 93%, 94%, 95%, 96%, 97%, 98%, 99%, or 100% identical to SEQ ID NO: 43. In some embodiments, the deubiquitinase comprises an amino acid sequence at least 80%, 81%, 82%, 83%, 84%, 85%, 86%, 87%, 88%, 89%, 90%, 91%, 92%, 93%, 94%, 95%, 96%, 97%, 98%, 99%, or 100% identical to SEQ ID NO: 44. In some embodiments, the deubiquitinase comprises an amino acid sequence at least 80%, 81%, 82%, 83%, 84%, 85%, 86%, 87%, 88%, 89%, 90%, 91%, 92%, 93%, 94%, 95%, 96%, 97%, 98%, 99%, or 100% identical to SEQ ID NO: 45. In some embodiments, the deubiquitinase comprises an amino acid sequence at least 80%, 81%, 82%, 83%, 84%, 85%, 86%, 87%, 88%, 89%, 90%, 91%, 92%, 93%, 94%, 95%, 96%, 97%, 98%, 99%, or 100% identical to SEQ ID NO: 46. In some embodiments, the deubiquitinase comprises an amino acid sequence at least 80%, 81%, 82%, 83%, 84%, 85%, 86%, 87%, 88%, 89%, 90%, 91%, 92%, 93%, 94%, 95%, 96%, 97%, 98%, 99%, or 100% identical to SEQ ID NO: 47. In some embodiments, the deubiquitinase comprises an amino acid sequence at least 80%, 81%, 82%, 83%, 84%, 85%, 86%, 87%, 88%, 89%, 90%, 91%, 92%, 93%, 94%, 95%, 96%, 97%, 98%, 99%, or 100% identical to SEQ ID NO: 48. In some embodiments, the deubiquitinase comprises an amino acid sequence at least 80%, 81%, 82%, 83%, 84%, 85%, 86%, 87%, 88%, 89%, 90%, 91%, 92%, 93%, 94%, 95%, 96%, 97%, 98%, 99%, or 100% identical to SEQ ID NO: 49. In some embodiments, the deubiquitinase comprises an amino acid sequence at least 80%, 81%, 82%, 83%, 84%, 85%, 86%, 87%, 88%, 89%, 90%, 91%, 92%, 93%, 94%, 95%, 96%, 97%, 98%, 99%, or 100% identical to SEQ ID NO: 50. In some embodiments, the deubiquitinase comprises an amino acid sequence at least 80%, 81%, 82%, 83%, 84%, 85%, 86%, 87%, 88%, 89%, 90%, 91%, 92%, 93%, 94%, 95%, 96%, 97%, 98%, 99%, or 100% identical to SEQ ID NO: 51. In some embodiments, the deubiquitinase comprises an amino acid sequence at least 80%, 81%, 82%, 83%, 84%, 85%, 86%, 87%, 88%, 89%, 90%, 91%, 92%, 93%, 94%, 95%, 96%, 97%, 98%, 99%, or 100% identical to SEQ ID NO: 52. In some embodiments, the deubiquitinase comprises an amino acid sequence at least 80%, 81%, 82%, 83%, 84%, 85%, 86%, 87%, 88%, 89%, 90%, 91%, 92%, 93%, 94%, 95%, 96%, 97%, 98%, 99%, or 100% identical to SEQ ID NO: 53. In some embodiments, the deubiquitinase comprises an amino acid sequence at least 80%, 81%, 82%, 83%, 84%, 85%, 86%, 87%, 88%, 89%, 90%, 91%, 92%, 93%, 94%, 95%, 96%, 97%, 98%, 99%, or 100% identical to SEQ ID NO: 54. In some embodiments, the deubiquitinase comprises an amino acid sequence at least 80%, 81%, 82%, 83%, 84%, 85%, 86%, 87%, 88%, 89%, 90%, 91%, 92%, 93%, 94%, 95%, 96%, 97%, 98%, 99%, or 100% identical to SEQ ID NO: 55. In some embodiments, the deubiquitinase comprises an amino acid sequence at least 80%, 81%, 82%, 83%, 84%, 85%, 86%, 87%, 88%, 89%, 90%, 91%, 92%, 93%, 94%, 95%, 96%, 97%, 98%, 99%, or 100% identical to SEQ ID NO: 56. In some embodiments, the deubiquitinase comprises an amino acid sequence at least 80%, 81%, 82%, 83%, 84%, 85%, 86%, 87%, 88%, 89%, 90%, 91%, 92%, 93%, 94%, 95%, 96%, 97%, 98%, 99%, or 100% identical to SEQ ID NO: 57. In some embodiments, the deubiquitinase comprises an amino acid sequence at least 80%, 81%, 82%, 83%, 84%, 85%, 86%, 87%, 88%, 89%, 90%, 91%, 92%, 93%, 94%, 95%, 96%, 97%, 98%, 99%, or 100% identical to SEQ ID NO: 58. In some embodiments, the deubiquitinase comprises an amino acid sequence at least 80%, 81%, 82%, 83%, 84%, 85%, 86%, 87%, 88%, 89%, 90%, 91%, 92%, 93%, 94%, 95%, 96%, 97%, 98%, 99%, or 100% identical to SEQ ID NO: 59. In some embodiments, the deubiquitinase comprises an amino acid sequence at least 80%, 81%, 82%, 83%, 84%, 85%, 86%, 87%, 88%, 89%, 90%, 91%, 92%, 93%, 94%, 95%, 96%, 97%, 98%, 99%, or 100% identical to SEQ ID NO: 60. In some embodiments, the deubiquitinase comprises an amino acid sequence at least 80%, 81%, 82%, 83%, 84%, 85%, 86%, 87%, 88%, 89%, 90%, 91%, 92%, 93%, 94%, 95%, 96%, 97%, 98%, 99%, or 100% identical to SEQ ID NO: 61. In some embodiments, the deubiquitinase comprises an amino acid sequence at least 80%, 81%, 82%, 83%, 84%, 85%, 86%, 87%, 88%, 89%, 90%, 91%, 92%, 93%, 94%, 95%, 96%, 97%, 98%, 99%, or 100% identical to SEQ ID NO: 62. In some embodiments, the deubiquitinase comprises an amino acid sequence at least 80%, 81%, 82%, 83%, 84%, 85%, 86%, 87%, 88%, 89%, 90%, 91%, 92%, 93%, 94%, 95%, 96%, 97%, 98%, 99%, or 100% identical to SEQ ID NO: 63. In some embodiments, the deubiquitinase comprises an amino acid sequence at least 80%, 81%, 82%, 83%, 84%, 85%, 86%, 87%, 88%, 89%, 90%, 91%, 92%, 93%, 94%, 95%, 96%, 97%, 98%, 99%, or 100% identical to SEQ ID NO: 64. In some embodiments, the deubiquitinase comprises an amino acid sequence at least 80%, 81%, 82%, 83%, 84%, 85%, 86%, 87%, 88%, 89%, 90%, 91%, 92%, 93%, 94%, 95%, 96%, 97%, 98%, 99%, or 100% identical to SEQ ID NO: 65. In some embodiments, the deubiquitinase comprises an amino acid sequence at least 80%, 81%, 82%, 83%, 84%, 85%, 86%, 87%, 88%, 89%, 90%, 91%, 92%, 93%, 94%, 95%, 96%, 97%, 98%, 99%, or 100% identical to SEQ ID NO: 66. In some embodiments, the deubiquitinase comprises an amino acid sequence at least 80%, 81%, 82%, 83%, 84%, 85%, 86%, 87%, 88%, 89%, 90%, 91%, 92%, 93%, 94%, 95%, 96%, 97%, 98%, 99%, or 100% identical to SEQ ID NO: 67. In some embodiments, the deubiquitinase comprises an amino acid sequence at least 80%, 81%, 82%, 83%, 84%, 85%, 86%, 87%, 88%, 89%, 90%, 91%, 92%, 93%, 94%, 95%, 96%, 97%, 98%, 99%, or 100% identical to SEQ ID NO: 68. In some embodiments, the deubiquitinase comprises an amino acid sequence at least 80%, 81%, 82%, 83%, 84%, 85%, 86%, 87%, 88%, 89%, 90%, 91%, 92%, 93%, 94%, 95%, 96%, 97%, 98%, 99%, or 100% identical to SEQ ID NO: 69. In some embodiments, the deubiquitinase comprises an amino acid sequence at least 80%, 81%, 82%, 83%, 84%, 85%, 86%, 87%, 88%, 89%, 90%, 91%, 92%, 93%, 94%, 95%, 96%, 97%, 98%, 99%, or 100% identical to SEQ ID NO: 70. In some embodiments, the deubiquitinase comprises an amino acid sequence at least 80%, 81%, 82%, 83%, 84%, 85%, 86%, 87%, 88%, 89%, 90%, 91%, 92%, 93%, 94%, 95%, 96%, 97%, 98%, 99%, or 100% identical to SEQ ID NO: 71. In some embodiments, the deubiquitinase comprises an amino acid sequence at least 80%, 81%, 82%, 83%, 84%, 85%, 86%, 87%, 88%, 89%, 90%, 91%, 92%, 93%, 94%, 95%, 96%, 97%, 98%, 99%, or 100% identical to SEQ ID NO: 72. In some embodiments, the deubiquitinase comprises an amino acid sequence at least 80%, 81%, 82%, 83%, 84%, 85%, 86%, 87%, 88%, 89%, 90%, 91%, 92%, 93%, 94%, 95%, 96%, 97%, 98%, 99%, or 100% identical to SEQ ID NO: 73. In some embodiments, the deubiquitinase comprises an amino acid sequence at least 80%, 81%, 82%, 83%, 84%, 85%, 86%, 87%, 88%, 89%, 90%, 91%, 92%, 93%, 94%, 95%, 96%, 97%, 98%, 99%, or 100% identical to SEQ ID NO: 74. In some embodiments, the deubiquitinase comprises an amino acid sequence at least 80%, 81%, 82%, 83%, 84%, 85%, 86%, 87%, 88%, 89%, 90%, 91%, 92%, 93%, 94%, 95%, 96%, 97%, 98%, 99%, or 100% identical to SEQ ID NO: 75. In some embodiments, the deubiquitinase comprises an amino acid sequence at least 80%, 81%, 82%, 83%, 84%, 85%, 86%, 87%, 88%, 89%, 90%, 91%, 92%, 93%, 94%, 95%, 96%, 97%, 98%, 99%, or 100% identical to SEQ ID NO: 76. In some embodiments, the deubiquitinase comprises an amino acid sequence at least 80%, 81%, 82%, 83%, 84%, 85%, 86%, 87%, 88%, 89%, 90%, 91%, 92%, 93%, 94%, 95%, 96%, 97%, 98%, 99%, or 100% identical to SEQ ID NO: 77. In some embodiments, the deubiquitinase comprises an amino acid sequence at least 80%, 81%, 82%, 83%, 84%, 85%, 86%, 87%, 88%, 89%, 90%, 91%, 92%, 93%, 94%, 95%, 96%, 97%, 98%, 99%, or 100% identical to SEQ ID NO: 78. In some embodiments, the deubiquitinase comprises an amino acid sequence at least 80%, 81%, 82%, 83%, 84%, 85%, 86%, 87%, 88%, 89%, 90%, 91%, 92%, 93%, 94%, 95%, 96%, 97%, 98%, 99%, or 100% identical to SEQ ID NO: 79. In some embodiments, the deubiquitinase comprises an amino acid sequence at least 80%, 81%, 82%, 83%, 84%, 85%, 86%, 87%, 88%, 89%, 90%, 91%, 92%, 93%, 94%, 95%, 96%, 97%, 98%, 99%, or 100% identical to SEQ ID NO: 80. In some embodiments, the deubiquitinase comprises an amino acid sequence at least 80%, 81%, 82%, 83%, 84%, 85%, 86%, 87%, 88%, 89%, 90%, 91%, 92%, 93%, 94%, 95%, 96%, 97%, 98%, 99%, or 100% identical to SEQ ID NO: 81. In some embodiments, the deubiquitinase comprises an amino acid sequence at least 80%, 81%, 82%, 83%, 84%, 85%, 86%, 87%, 88%, 89%, 90%, 91%, 92%, 93%, 94%, 95%, 96%, 97%, 98%, 99%, or 100% identical to SEQ ID NO: 82. In some embodiments, the deubiquitinase comprises an amino acid sequence at least 80%, 81%, 82%, 83%, 84%, 85%, 86%, 87%, 88%, 89%, 90%, 91%, 92%, 93%, 94%, 95%, 96%, 97%, 98%, 99%, or 100% identical to SEQ ID NO: 83. In some embodiments, the deubiquitinase comprises an amino acid sequence at least 80%, 81%, 82%, 83%, 84%, 85%, 86%, 87%, 88%, 89%, 90%, 91%, 92%, 93%, 94%, 95%, 96%, 97%, 98%, 99%, or 100% identical to SEQ ID NO: 84. In some embodiments, the deubiquitinase comprises an amino acid sequence at least 80%, 81%, 82%, 83%, 84%, 85%, 86%, 87%, 88%, 89%, 90%, 91%, 92%, 93%, 94%, 95%, 96%, 97%, 98%, 99%, or 100% identical to SEQ ID NO: 85. In some embodiments, the deubiquitinase comprises an amino acid sequence at least 80%, 81%, 82%, 83%, 84%, 85%, 86%, 87%, 88%, 89%, 90%, 91%, 92%, 93%, 94%, 95%, 96%, 97%, 98%, 99%, or 100% identical to SEQ ID NO: 86. In some embodiments, the deubiquitinase comprises an amino acid sequence at least 80%, 81%, 82%, 83%, 84%, 85%, 86%, 87%, 88%, 89%, 90%, 91%, 92%, 93%, 94%, 95%, 96%, 97%, 98%, 99%, or 100% identical to SEQ ID NO: 87. In some embodiments, the deubiquitinase comprises an amino acid sequence at least 80%, 81%, 82%, 83%, 84%, 85%, 86%, 87%, 88%, 89%, 90%, 91%, 92%, 93%, 94%, 95%, 96%, 97%, 98%, 99%, or 100% identical to SEQ ID NO: 88. In some embodiments, the deubiquitinase comprises an amino acid sequence at least 80%, 81%, 82%, 83%, 84%, 85%, 86%, 87%, 88%, 89%, 90%, 91%, 92%, 93%, 94%, 95%, 96%, 97%, 98%, 99%, or 100% identical to SEQ ID NO: 89. In some embodiments, the deubiquitinase comprises an amino acid sequence at least 80%, 81%, 82%, 83%, 84%, 85%, 86%, 87%, 88%, 89%, 90%, 91%, 92%, 93%, 94%, 95%, 96%, 97%, 98%, 99%, or 100% identical to SEQ ID NO: 90. In some embodiments, the deubiquitinase comprises an amino acid sequence at least 80%, 81%, 82%, 83%, 84%, 85%, 86%, 87%, 88%, 89%, 90%, 91%, 92%, 93%, 94%, 95%, 96%, 97%, 98%, 99%, or 100% identical to SEQ ID NO: 91. In some embodiments, the deubiquitinase comprises an amino acid sequence at least 80%, 81%, 82%, 83%, 84%, 85%, 86%, 87%, 88%, 89%, 90%, 91%, 92%, 93%, 94%, 95%, 96%, 97%, 98%, 99%, or 100% identical to SEQ ID NO: 92. In some embodiments, the deubiquitinase comprises an amino acid sequence at least 80%, 81%, 82%, 83%, 84%, 85%, 86%, 87%, 88%, 89%, 90%, 91%, 92%, 93%, 94%, 95%, 96%, 97%, 98%, 99%, or 100% identical to SEQ ID NO: 93. In some embodiments, the deubiquitinase comprises an amino acid sequence at least 80%, 81%, 82%, 83%, 84%, 85%, 86%, 87%, 88%, 89%, 90%, 91%, 92%, 93%, 94%, 95%, 96%, 97%, 98%, 99%, or 100% identical to SEQ ID NO: 94. In some embodiments, the deubiquitinase comprises an amino acid sequence at least 80%, 81%, 82%, 83%, 84%, 85%, 86%, 87%, 88%, 89%, 90%, 91%, 92%, 93%, 94%, 95%, 96%, 97%, 98%, 99%, or 100% identical to SEQ ID NO: 95. In some embodiments, the deubiquitinase comprises an amino acid sequence at least 80%, 81%, 82%, 83%, 84%, 85%, 86%, 87%, 88%, 89%, 90%, 91%, 92%, 93%, 94%, 95%, 96%, 97%, 98%, 99%, or 100% identical to SEQ ID NO: 96. In some embodiments, the deubiquitinase comprises an amino acid sequence at least 80%, 81%, 82%, 83%, 84%, 85%, 86%, 87%, 88%, 89%, 90%, 91%, 92%, 93%, 94%, 95%, 96%, 97%, 98%, 99%, or 100% identical to SEQ ID NO: 97. In some embodiments, the deubiquitinase comprises an amino acid sequence at least 80%, 81%, 82%, 83%, 84%, 85%, 86%, 87%, 88%, 89%, 90%, 91%, 92%, 93%, 94%, 95%, 96%, 97%, 98%, 99%, or 100% identical to SEQ ID NO: 98. In some embodiments, the deubiquitinase comprises an amino acid sequence at least 80%, 81%, 82%, 83%, 84%, 85%, 86%, 87%, 88%, 89%, 90%, 91%, 92%, 93%, 94%, 95%, 96%, 97%, 98%, 99%, or 100% identical to SEQ ID NO: 99. In some embodiments, the deubiquitinase comprises an amino acid sequence at least 80%, 81%, 82%, 83%, 84%, 85%, 86%, 87%, 88%, 89%, 90%, 91%, 92%, 93%, 94%, 95%, 96%, 97%, 98%, 99%, or 100% identical to SEQ ID NO: 100. In some embodiments, the deubiquitinase comprises an amino acid sequence at least 80%, 81%, 82%, 83%, 84%, 85%, 86%, 87%, 88%, 89%, 90%, 91%, 92%, 93%, 94%, 95%, 96%, 97%, 98%, 99%, or 100% identical to SEQ ID NO: 101. In some embodiments, the deubiquitinase comprises an amino acid sequence at least 80%, 81%, 82%, 83%, 84%, 85%, 86%, 87%, 88%, 89%, 90%, 91%, 92%, 93%, 94%, 95%, 96%, 97%, 98%, 99%, or 100% identical to SEQ ID NO: 102. In some embodiments, the deubiquitinase comprises an amino acid sequence at least 80%, 81%, 82%, 83%, 84%, 85%, 86%, 87%, 88%, 89%, 90%, 91%, 92%, 93%, 94%, 95%, 96%, 97%, 98%, 99%, or 100% identical to SEQ ID NO: 103. In some embodiments, the deubiquitinase comprises an amino acid sequence at least 80%, 81%, 82%, 83%, 84%, 85%, 86%, 87%, 88%, 89%, 90%, 91%, 92%, 93%, 94%, 95%, 96%, 97%, 98%, 99%, or 100% identical to SEQ ID NO: 104. In some embodiments, the deubiquitinase comprises an amino acid sequence at least 80%, 81%, 82%, 83%, 84%, 85%, 86%, 87%, 88%, 89%, 90%, 91%, 92%, 93%, 94%, 95%, 96%, 97%, 98%, 99%, or 100% identical to SEQ ID NO: 105. In some embodiments, the deubiquitinase comprises an amino acid sequence at least 80%, 81%, 82%, 83%, 84%, 85%, 86%, 87%, 88%, 89%, 90%, 91%, 92%, 93%, 94%, 95%, 96%, 97%, 98%, 99%, or 100% identical to SEQ ID NO: 106. In some embodiments, the deubiquitinase comprises an amino acid sequence at least 80%, 81%, 82%, 83%, 84%, 85%, 86%, 87%, 88%, 89%, 90%, 91%, 92%, 93%, 94%, 95%, 96%, 97%, 98%, 99%, or 100% identical to SEQ ID NO: 107. In some embodiments, the deubiquitinase comprises an amino acid sequence at least 80%, 81%, 82%, 83%, 84%, 85%, 86%, 87%, 88%, 89%, 90%, 91%, 92%, 93%, 94%, 95%, 96%, 97%, 98%, 99%, or 100% identical to SEQ ID NO: 108. In some embodiments, the deubiquitinase comprises an amino acid sequence at least 80%, 81%, 82%, 83%, 84%, 85%, 86%, 87%, 88%, 89%, 90%, 91%, 92%, 93%, 94%, 95%, 96%, 97%, 98%, 99%, or 100% identical to SEQ ID NO: 109. In some embodiments, the deubiquitinase comprises an amino acid sequence at least 80%, 81%, 82%, 83%, 84%, 85%, 86%, 87%, 88%, 89%, 90%, 91%, 92%, 93%, 94%, 95%, 96%, 97%, 98%, 99%, or 100% identical to SEQ ID NO: 110. In some embodiments, the deubiquitinase comprises an amino acid sequence at least 80%, 81%, 82%, 83%, 84%, 85%, 86%, 87%, 88%, 89%, 90%, 91%, 92%, 93%, 94%, 95%, 96%, 97%, 98%, 99%, or 100% identical to SEQ ID NO: 111. In some embodiments, the deubiquitinase comprises an amino acid sequence at least 80%, 81%, 82%, 83%, 84%, 85%, 86%, 87%, 88%, 89%, 90%, 91%, 92%, 93%, 94%, 95%, 96%, 97%, 98%, 99%, or 100% identical to SEQ ID NO: 112.

[0207] In some embodiments, the amino acid sequence of the effector domain comprises an amino acid sequence at least 80%, 81%, 82%, 83%, 84%, 85%, 86%, 87%, 88%, 89%, 90%, 91%, 92%, 93%, 94%, 95%, 96%, 97%, 98%, 99%, or 100% identical to the amino acid sequence of the catalytic domain of any one of SEQ ID NOS: 1-112. In some embodiments, the amino acid sequence of the effector domain consists of an amino acid sequence at least 80%, 81%, 82%, 83%, 84%, 85%, 86%, 87%, 88%, 89%, 90%, 91%, 92%, 93%, 94%, 95%, 96%, 97%, 98%, 99%, or 100% identical to the amino acid sequence of the catalytic domain of any one of SEQ ID NOS: 1-112.

[0208] In some embodiments, the amino acid sequence of the effector domain comprises an amino acid sequence at least 80%, 81%, 82%, 83%, 84%, 85%, 86%, 87%, 88%, 89%, 90%, 91%, 92%, 93%, 94%, 95%, 96%, 97%, 98%, 99%, or 100% identical to the amino acid sequence of the catalytic domain of SEQ ID NO: 1. In some embodiments, the amino acid sequence of the effector domain comprises an amino acid sequence at least 80%, 81%, 82%, 83%, 84%, 85%, 86%, 87%, 88%, 89%, 90%, 91%, 92%, 93%, 94%, 95%, 96%, 97%, 98%, 99%, or 100% identical to the amino acid sequence of the catalytic domain of SEQ ID NO: 2. In some embodiments, the amino acid sequence of the effector domain comprises an amino acid sequence at least 80%, 81%, 82%, 83%, 84%, 85%, 86%, 87%, 88%, 89%, 90%, 91%, 92%, 93%, 94%, 95%, 96%, 97%, 98%, 99%, or 100% identical to the amino acid sequence of the catalytic domain of SEQ ID NO: 3. In some embodiments, the amino acid sequence of the effector domain comprises an amino acid sequence at least 80%, 81%, 82%, 83%, 84%, 85%, 86%, 87%, 88%, 89%, 90%, 91%, 92%, 93%, 94%, 95%, 96%, 97%, 98%, 99%, or 100% identical to the amino acid sequence of the catalytic domain of SEQ ID NO: 4. In some embodiments, the amino acid sequence of the effector domain comprises an amino acid sequence at least 80%, 81%, 82%, 83%, 84%, 85%, 86%, 87%, 88%, 89%, 90%, 91%, 92%, 93%, 94%, 95%, 96%, 97%, 98%, 99%, or 100% identical to the amino acid sequence of the catalytic domain of SEQ ID NO: 5. In some embodiments, the amino acid sequence of the effector domain comprises an amino acid sequence at least 80%, 81%, 82%, 83%, 84%, 85%, 86%, 87%, 88%, 89%, 90%, 91%, 92%, 93%, 94%, 95%, 96%, 97%, 98%, 99%, or 100% identical to the amino acid sequence of the catalytic domain of SEQ ID NO: 6. In some embodiments, the amino acid sequence of the effector domain comprises an amino acid sequence at least 80%, 81%, 82%, 83%, 84%, 85%, 86%, 87%, 88%, 89%, 90%, 91%, 92%, 93%, 94%, 95%, 96%, 97%, 98%, 99%, or 100% identical to the amino acid sequence of the catalytic domain of SEQ ID NO: 7. In some embodiments, the amino acid sequence of the effector domain comprises an amino acid sequence at least 80%, 81%, 82%, 83%, 84%, 85%, 86%, 87%, 88%, 89%, 90%, 91%, 92%, 93%, 94%, 95%, 96%, 97%, 98%, 99%, or 100% identical to the amino acid sequence of the catalytic domain of SEQ ID NO: 8. In some embodiments, the amino acid sequence of the effector domain comprises an amino acid sequence at least 80%, 81%, 82%, 83%, 84%, 85%, 86%, 87%, 88%, 89%, 90%, 91%, 92%, 93%, 94%, 95%, 96%, 97%, 98%, 99%, or 100% identical to the amino acid sequence of the catalytic domain of SEQ ID NO: 9. In some embodiments, the amino acid sequence of the effector domain comprises an amino acid sequence at least 80%, 81%, 82%, 83%, 84%, 85%, 86%, 87%, 88%, 89%, 90%, 91%, 92%, 93%, 94%, 95%, 96%, 97%, 98%, 99%, or 100% identical to the amino acid sequence of the catalytic domain of SEQ ID NO: 10. In some embodiments, the amino acid sequence of the effector domain comprises an amino acid sequence at least 80%, 81%, 82%, 83%, 84%, 85%, 86%, 87%, 88%, 89%, 90%, 91%, 92%, 93%, 94%, 95%, 96%, 97%, 98%, 99%, or 100% identical to the amino acid sequence of the catalytic domain of SEQ ID NO: 11. In some embodiments, the amino acid sequence of the effector domain comprises an amino acid sequence at least 80%, 81%, 82%, 83%, 84%, 85%, 86%, 87%, 88%, 89%, 90%, 91%, 92%, 93%, 94%, 95%, 96%, 97%, 98%, 99%, or 100% identical to the amino acid sequence of the catalytic domain of SEQ ID NO: 12. In some embodiments, the amino acid sequence of the effector domain comprises an amino acid sequence at least 80%, 81%, 82%, 83%, 84%, 85%, 86%, 87%, 88%, 89%, 90%, 91%, 92%, 93%, 94%, 95%, 96%, 97%, 98%, 99%, or 100% identical to the amino acid sequence of the catalytic domain of SEQ ID NO: 13. In some embodiments, the amino acid sequence of the effector domain comprises an amino acid sequence at least 80%, 81%, 82%, 83%, 84%, 85%, 86%, 87%, 88%, 89%, 90%, 91%, 92%, 93%, 94%, 95%, 96%, 97%, 98%, 99%, or 100% identical to the amino acid sequence of the catalytic domain of SEQ ID NO: 14. In some embodiments, the amino acid sequence of the effector domain comprises an amino acid sequence at least 80%, 81%, 82%, 83%, 84%, 85%, 86%, 87%, 88%, 89%, 90%, 91%, 92%, 93%, 94%, 95%, 96%, 97%, 98%, 99%, or 100% identical to the amino acid sequence of the catalytic domain of SEQ ID NO: 15. In some embodiments, the amino acid sequence of the effector domain comprises an amino acid sequence at least 80%, 81%, 82%, 83%, 84%, 85%, 86%, 87%, 88%, 89%, 90%, 91%, 92%, 93%, 94%, 95%, 96%, 97%, 98%, 99%, or 100% identical to the amino acid sequence of the catalytic domain of SEQ ID NO: 16. In some embodiments, the amino acid sequence of the effector domain comprises an amino acid sequence at least 80%, 81%, 82%, 83%, 84%, 85%, 86%, 87%, 88%, 89%, 90%, 91%, 92%, 93%, 94%, 95%, 96%, 97%, 98%, 99%, or 100% identical to the amino acid sequence of the catalytic domain of SEQ ID NO: 17. In some embodiments, the amino acid sequence of the effector domain comprises an amino acid sequence at least 80%, 81%, 82%, 83%, 84%, 85%, 86%, 87%, 88%, 89%, 90%, 91%, 92%, 93%, 94%, 95%, 96%, 97%, 98%, 99%, or 100% identical to the amino acid sequence of the catalytic domain of SEQ ID NO: 18. In some embodiments, the amino acid sequence of the effector domain comprises an amino acid sequence at least 80%, 81%, 82%, 83%, 84%, 85%, 86%, 87%, 88%, 89%, 90%, 91%, 92%, 93%, 94%, 95%, 96%, 97%, 98%, 99%, or 100% identical to the amino acid sequence of the catalytic domain of SEQ ID NO: 19. In some embodiments, the amino acid sequence of the effector domain comprises an amino acid sequence at least 80%, 81%, 82%, 83%, 84%, 85%, 86%, 87%, 88%, 89%, 90%, 91%, 92%, 93%, 94%, 95%, 96%, 97%, 98%, 99%, or 100% identical to the amino acid sequence of the catalytic domain of SEQ ID NO: 20. In some embodiments, the amino acid sequence of the effector domain comprises an amino acid sequence at least 80%, 81%, 82%, 83%, 84%, 85%, 86%, 87%, 88%, 89%, 90%, 91%, 92%, 93%, 94%, 95%, 96%, 97%, 98%, 99%, or 100% identical to the amino acid sequence of the catalytic domain of SEQ ID NO: 21. In some embodiments, the amino acid sequence of the effector domain comprises an amino acid sequence at least 80%, 81%, 82%, 83%, 84%, 85%, 86%, 87%, 88%, 89%, 90%, 91%, 92%, 93%, 94%, 95%, 96%, 97%, 98%, 99%, or 100% identical to the amino acid sequence of the catalytic domain of SEQ ID NO: 22. In some embodiments, the amino acid sequence of the effector domain comprises an amino acid sequence at least 80%, 81%, 82%, 83%, 84%, 85%, 86%, 87%, 88%, 89%, 90%, 91%, 92%, 93%, 94%, 95%, 96%, 97%, 98%, 99%, or 100% identical to the amino acid sequence of the catalytic domain of SEQ ID NO: 23. In some embodiments, the amino acid sequence of the effector domain comprises an amino acid sequence at least 80%, 81%, 82%, 83%, 84%, 85%, 86%, 87%, 88%, 89%, 90%, 91%, 92%, 93%, 94%, 95%, 96%, 97%, 98%, 99%, or 100% identical to the amino acid sequence of the catalytic domain of SEQ ID NO: 24. In some embodiments, the amino acid sequence of the effector domain comprises an amino acid sequence at least 80%, 81%, 82%, 83%, 84%, 85%, 86%, 87%, 88%, 89%, 90%, 91%, 92%, 93%, 94%, 95%, 96%, 97%, 98%, 99%, or 100% identical to the amino acid sequence of the catalytic domain of SEQ ID NO: 25. In some embodiments, the amino acid sequence of the effector domain comprises an amino acid sequence at least 80%, 81%, 82%, 83%, 84%, 85%, 86%, 87%, 88%, 89%, 90%, 91%, 92%, 93%, 94%, 95%, 96%, 97%, 98%, 99%, or 100% identical to the amino acid sequence of the catalytic domain of SEQ ID NO: 26. In some embodiments, the amino acid sequence of the effector domain comprises an amino acid sequence at least 80%, 81%, 82%, 83%, 84%, 85%, 86%, 87%, 88%, 89%, 90%, 91%, 92%, 93%, 94%, 95%, 96%, 97%, 98%, 99%, or 100% identical to the amino acid sequence of the catalytic domain of SEQ ID NO: 27. In some embodiments, the amino acid sequence of the effector domain comprises an amino acid sequence at least 80%, 81%, 82%, 83%, 84%, 85%, 86%, 87%, 88%, 89%, 90%, 91%, 92%, 93%, 94%, 95%, 96%, 97%, 98%, 99%, or 100% identical to the amino acid sequence of the catalytic domain of SEQ ID NO: 28. In some embodiments, the amino acid sequence of the effector domain comprises an amino acid sequence at least 80%, 81%, 82%, 83%, 84%, 85%, 86%, 87%, 88%, 89%, 90%, 91%, 92%, 93%, 94%, 95%, 96%, 97%, 98%, 99%, or 100% identical to the amino acid sequence of the catalytic domain of SEQ ID NO: 29. In some embodiments, the amino acid sequence of the effector domain comprises an amino acid sequence at least 80%, 81%, 82%, 83%, 84%, 85%, 86%, 87%, 88%, 89%, 90%, 91%, 92%, 93%, 94%, 95%, 96%, 97%, 98%, 99%, or 100% identical to the amino acid sequence of the catalytic domain of SEQ ID NO: 30. In some embodiments, the amino acid sequence of the effector domain comprises an amino acid sequence at least 80%, 81%, 82%, 83%, 84%, 85%, 86%, 87%, 88%, 89%, 90%, 91%, 92%, 93%, 94%, 95%, 96%, 97%, 98%, 99%, or 100% identical to the amino acid sequence of the catalytic domain of SEQ ID NO: 31. In some embodiments, the amino acid sequence of the effector domain comprises an amino acid sequence at least 80%, 81%, 82%, 83%, 84%, 85%, 86%, 87%, 88%, 89%, 90%, 91%, 92%, 93%, 94%, 95%, 96%, 97%, 98%, 99%, or 100% identical to the amino acid sequence of the catalytic domain of SEQ ID NO: 32. In some embodiments, the amino acid sequence of the effector domain comprises an amino acid sequence at least 80%, 81%, 82%, 83%, 84%, 85%, 86%, 87%, 88%, 89%, 90%, 91%, 92%, 93%, 94%, 95%, 96%, 97%, 98%, 99%, or 100% identical to the amino acid sequence of the catalytic domain of SEQ ID NO: 33. In some embodiments, the amino acid sequence of the effector domain comprises an amino acid sequence at least 80%, 81%, 82%, 83%, 84%, 85%, 86%, 87%, 88%, 89%, 90%, 91%, 92%, 93%, 94%, 95%, 96%, 97%, 98%, 99%, or 100% identical to the amino acid sequence of the catalytic domain of SEQ ID NO: 34. In some embodiments, the amino acid sequence of the effector domain comprises an amino acid sequence at least 80%, 81%, 82%, 83%, 84%, 85%, 86%, 87%, 88%, 89%, 90%, 91%, 92%, 93%, 94%, 95%, 96%, 97%, 98%, 99%, or 100% identical to the amino acid sequence of the catalytic domain of SEQ ID NO: 35. In some embodiments, the amino acid sequence of the effector domain comprises an amino acid sequence at least 80%, 81%, 82%, 83%, 84%, 85%, 86%, 87%, 88%, 89%, 90%, 91%, 92%, 93%, 94%, 95%, 96%, 97%, 98%, 99%, or 100% identical to the amino acid sequence of the catalytic domain of SEQ ID NO: 36. In some embodiments, the amino acid sequence of the effector domain comprises an amino acid sequence at least 80%, 81%, 82%, 83%, 84%, 85%, 86%, 87%, 88%, 89%, 90%, 91%, 92%, 93%, 94%, 95%, 96%, 97%, 98%, 99%, or 100% identical to the amino acid sequence of the catalytic domain of SEQ ID NO: 37. In some embodiments, the amino acid sequence of the effector domain comprises an amino acid sequence at least 80%, 81%, 82%, 83%, 84%, 85%, 86%, 87%, 88%, 89%, 90%, 91%, 92%, 93%, 94%, 95%, 96%, 97%, 98%, 99%, or 100% identical to the amino acid sequence of the catalytic domain of SEQ ID NO: 38. In some embodiments, the amino acid sequence of the effector domain comprises an amino acid sequence at least 80%, 81%, 82%, 83%, 84%, 85%, 86%, 87%, 88%, 89%, 90%, 91%, 92%, 93%, 94%, 95%, 96%, 97%, 98%, 99%, or 100% identical to the amino acid sequence of the catalytic domain of SEQ ID NO: 39. In some embodiments, the amino acid sequence of the effector domain comprises an amino acid sequence at least 80%, 81%, 82%, 83%, 84%, 85%, 86%, 87%, 88%, 89%, 90%, 91%, 92%, 93%, 94%, 95%, 96%, 97%, 98%, 99%, or 100% identical to the amino acid sequence of the catalytic domain of SEQ ID NO: 40. In some embodiments, the amino acid sequence of the effector domain comprises an amino acid sequence at least 80%, 81%, 82%, 83%, 84%, 85%, 86%, 87%, 88%, 89%, 90%, 91%, 92%, 93%, 94%, 95%, 96%, 97%, 98%, 99%, or 100% identical to the amino acid sequence of the catalytic domain of SEQ ID NO: 41. In some embodiments, the amino acid sequence of the effector domain comprises an amino acid sequence at least 80%, 81%, 82%, 83%, 84%, 85%, 86%, 87%, 88%, 89%, 90%, 91%, 92%, 93%, 94%, 95%, 96%, 97%, 98%, 99%, or 100% identical to the amino acid sequence of the catalytic domain of SEQ ID NO: 42. In some embodiments, the amino acid sequence of the effector domain comprises an amino acid sequence at least 80%, 81%, 82%, 83%, 84%, 85%, 86%, 87%, 88%, 89%, 90%, 91%, 92%, 93%, 94%, 95%, 96%, 97%, 98%, 99%, or 100% identical to the amino acid sequence of the catalytic domain of SEQ ID NO: 43. In some embodiments, the amino acid sequence of the effector domain comprises an amino acid sequence at least 80%, 81%, 82%, 83%, 84%, 85%, 86%, 87%, 88%, 89%, 90%, 91%, 92%, 93%, 94%, 95%, 96%, 97%, 98%, 99%, or 100% identical to the amino acid sequence of the catalytic domain of SEQ ID NO: 44. In some embodiments, the amino acid sequence of the effector domain comprises an amino acid sequence at least 80%, 81%, 82%, 83%, 84%, 85%, 86%, 87%, 88%, 89%, 90%, 91%, 92%, 93%, 94%, 95%, 96%, 97%, 98%, 99%, or 100% identical to the amino acid sequence of the catalytic domain of SEQ ID NO: 45. In some embodiments, the amino acid sequence of the effector domain comprises an amino acid sequence at least 80%, 81%, 82%, 83%, 84%, 85%, 86%, 87%, 88%, 89%, 90%, 91%, 92%, 93%, 94%, 95%, 96%, 97%, 98%, 99%, or 100% identical to the amino acid sequence of the catalytic domain of SEQ ID NO: 46. In some embodiments, the amino acid sequence of the effector domain comprises an amino acid sequence at least 80%, 81%, 82%, 83%, 84%, 85%, 86%, 87%, 88%, 89%, 90%, 91%, 92%, 93%, 94%, 95%, 96%, 97%, 98%, 99%, or 100% identical to the amino acid sequence of the catalytic domain of SEQ ID NO: 47. In some embodiments, the amino acid sequence of the effector domain comprises an amino acid sequence at least 80%, 81%, 82%, 83%, 84%, 85%, 86%, 87%, 88%, 89%, 90%, 91%, 92%, 93%, 94%, 95%, 96%, 97%, 98%, 99%, or 100% identical to the amino acid sequence of the catalytic domain of SEQ ID NO: 48. In some embodiments, the amino acid sequence of the effector domain comprises an amino acid sequence at least 80%, 81%, 82%, 83%, 84%, 85%, 86%, 87%, 88%, 89%, 90%, 91%, 92%, 93%, 94%, 95%, 96%, 97%, 98%, 99%, or 100% identical to the amino acid sequence of the catalytic domain of SEQ ID NO: 49. In some embodiments, the amino acid sequence of the effector domain comprises an amino acid sequence at least 80%, 81%, 82%, 83%, 84%, 85%, 86%, 87%, 88%, 89%, 90%, 91%, 92%, 93%, 94%, 95%, 96%, 97%, 98%, 99%, or 100% identical to the amino acid sequence of the catalytic domain of SEQ ID NO: 50. In some embodiments, the amino acid sequence of the effector domain comprises an amino acid sequence at least 80%, 81%, 82%, 83%, 84%, 85%, 86%, 87%, 88%, 89%, 90%, 91%, 92%, 93%, 94%, 95%, 96%, 97%, 98%, 99%, or 100% identical to the amino acid sequence of the catalytic domain of SEQ ID NO: 51. In some embodiments, the amino acid sequence of the effector domain comprises an amino acid sequence at least 80%, 81%, 82%, 83%, 84%, 85%, 86%, 87%, 88%, 89%, 90%, 91%, 92%, 93%, 94%, 95%, 96%, 97%, 98%, 99%, or 100% identical to the amino acid sequence of the catalytic domain of SEQ ID NO: 52. In some embodiments, the amino acid sequence of the effector domain comprises an amino acid sequence at least 80%, 81%, 82%, 83%, 84%, 85%, 86%, 87%, 88%, 89%, 90%, 91%, 92%, 93%, 94%, 95%, 96%, 97%, 98%, 99%, or 100% identical to the amino acid sequence of the catalytic domain of SEQ ID NO: 53. In some embodiments, the amino acid sequence of the effector domain comprises an amino acid sequence at least 80%, 81%, 82%, 83%, 84%, 85%, 86%, 87%, 88%, 89%, 90%, 91%, 92%, 93%, 94%, 95%, 96%, 97%, 98%, 99%, or 100% identical to the amino acid sequence of the catalytic domain of SEQ ID NO: 54. In some embodiments, the amino acid sequence of the effector domain comprises an amino acid sequence at least 80%, 81%, 82%, 83%, 84%, 85%, 86%, 87%, 88%, 89%, 90%, 91%, 92%, 93%, 94%, 95%, 96%, 97%, 98%, 99%, or 100% identical to the amino acid sequence of the catalytic domain of SEQ ID NO: 55. In some embodiments, the amino acid sequence of the effector domain comprises an amino acid sequence at least 80%, 81%, 82%, 83%, 84%, 85%, 86%, 87%, 88%, 89%, 90%, 91%, 92%, 93%, 94%, 95%, 96%, 97%, 98%, 99%, or 100% identical to the amino acid sequence of the catalytic domain of SEQ ID NO: 56. In some embodiments, the amino acid sequence of the effector domain comprises an amino acid sequence at least 80%, 81%, 82%, 83%, 84%, 85%, 86%, 87%, 88%, 89%, 90%, 91%, 92%, 93%, 94%, 95%, 96%, 97%, 98%, 99%, or 100% identical to the amino acid sequence of the catalytic domain of SEQ ID NO: 57. In some embodiments, the amino acid sequence of the effector domain comprises an amino acid sequence at least 80%, 81%, 82%, 83%, 84%, 85%, 86%, 87%, 88%, 89%, 90%, 91%, 92%, 93%, 94%, 95%, 96%, 97%, 98%, 99%, or 100% identical to the amino acid sequence of the catalytic domain of SEQ ID NO: 58. In some embodiments, the amino acid sequence of the effector domain comprises an amino acid sequence at least 80%, 81%, 82%, 83%, 84%, 85%, 86%, 87%, 88%, 89%, 90%, 91%, 92%, 93%, 94%, 95%, 96%, 97%, 98%, 99%, or 100% identical to the amino acid sequence of the catalytic domain of SEQ ID NO: 59. In some embodiments, the amino acid sequence of the effector domain comprises an amino acid sequence at least 80%, 81%, 82%, 83%, 84%, 85%, 86%, 87%, 88%, 89%, 90%, 91%, 92%, 93%, 94%, 95%, 96%, 97%, 98%, 99%, or 100% identical to the amino acid sequence of the catalytic domain of SEQ ID NO: 60. In some embodiments, the amino acid sequence of the effector domain comprises an amino acid sequence at least 80%, 81%, 82%, 83%, 84%, 85%, 86%, 87%, 88%, 89%, 90%, 91%, 92%, 93%, 94%, 95%, 96%, 97%, 98%, 99%, or 100% identical to the amino acid sequence of the catalytic domain of SEQ ID NO: 61. In some embodiments, the amino acid sequence of the effector domain comprises an amino acid sequence at least 80%, 81%, 82%, 83%, 84%, 85%, 86%, 87%, 88%, 89%, 90%, 91%, 92%, 93%, 94%, 95%, 96%, 97%, 98%, 99%, or 100% identical to the amino acid sequence of the catalytic domain of SEQ ID NO: 62. In some embodiments, the amino acid sequence of the effector domain comprises an amino acid sequence at least 80%, 81%, 82%, 83%, 84%, 85%, 86%, 87%, 88%, 89%, 90%, 91%, 92%, 93%, 94%, 95%, 96%, 97%, 98%, 99%, or 100% identical to the amino acid sequence of the catalytic domain of SEQ ID NO: 63. In some embodiments, the amino acid sequence of the effector domain comprises an amino acid sequence at least 80%, 81%, 82%, 83%, 84%, 85%, 86%, 87%, 88%, 89%, 90%, 91%, 92%, 93%, 94%, 95%, 96%, 97%, 98%, 99%, or 100% identical to the amino acid sequence of the catalytic domain of SEQ ID NO: 64. In some embodiments, the amino acid sequence of the effector domain comprises an amino acid sequence at least 80%, 81%, 82%, 83%, 84%, 85%, 86%, 87%, 88%, 89%, 90%, 91%, 92%, 93%, 94%, 95%, 96%, 97%, 98%, 99%, or 100% identical to the amino acid sequence of the catalytic domain of SEQ ID NO: 65. In some embodiments, the amino acid sequence of the effector domain comprises an amino acid sequence at least 80%, 81%, 82%, 83%, 84%, 85%, 86%, 87%, 88%, 89%, 90%, 91%, 92%, 93%, 94%, 95%, 96%, 97%, 98%, 99%, or 100% identical to the amino acid sequence of the catalytic domain of SEQ ID NO: 66. In some embodiments, the amino acid sequence of the effector domain comprises an amino acid sequence at least 80%, 81%, 82%, 83%, 84%, 85%, 86%, 87%, 88%, 89%, 90%, 91%, 92%, 93%, 94%, 95%, 96%, 97%, 98%, 99%, or 100% identical to the amino acid sequence of the catalytic domain of SEQ ID NO: 67. In some embodiments, the amino acid sequence of the effector domain comprises an amino acid sequence at least 80%, 81%, 82%, 83%, 84%, 85%, 86%, 87%, 88%, 89%, 90%, 91%, 92%, 93%, 94%, 95%, 96%, 97%, 98%, 99%, or 100% identical to the amino acid sequence of the catalytic domain of SEQ ID NO: 68. In some embodiments, the amino acid sequence of the effector domain comprises an amino acid sequence at least 80%, 81%, 82%, 83%, 84%, 85%, 86%, 87%, 88%, 89%, 90%, 91%, 92%, 93%, 94%, 95%, 96%, 97%, 98%, 99%, or 100% identical to the amino acid sequence of the catalytic domain of SEQ ID NO: 69. In some embodiments, the amino acid sequence of the effector domain comprises an amino acid sequence at least 80%, 81%, 82%, 83%, 84%, 85%, 86%, 87%, 88%, 89%, 90%, 91%, 92%, 93%, 94%, 95%, 96%, 97%, 98%, 99%, or 100% identical to the amino acid sequence of the catalytic domain of SEQ ID NO: 70. In some embodiments, the amino acid sequence of the effector domain comprises an amino acid sequence at least 80%, 81%, 82%, 83%, 84%, 85%, 86%, 87%, 88%, 89%, 90%, 91%, 92%, 93%, 94%, 95%, 96%, 97%, 98%, 99%, or 100% identical to the amino acid sequence of the catalytic domain of SEQ ID NO: 71. In some embodiments, the amino acid sequence of the effector domain comprises an amino acid sequence at least 80%, 81%, 82%, 83%, 84%, 85%, 86%, 87%, 88%, 89%, 90%, 91%, 92%, 93%, 94%, 95%, 96%, 97%, 98%, 99%, or 100% identical to the amino acid sequence of the catalytic domain of SEQ ID NO: 72. In some embodiments, the amino acid sequence of the effector domain comprises an amino acid sequence at least 80%, 81%, 82%, 83%, 84%, 85%, 86%, 87%, 88%, 89%, 90%, 91%, 92%, 93%, 94%, 95%, 96%, 97%, 98%, 99%, or 100% identical to the amino acid sequence of the catalytic domain of SEQ ID NO: 73. In some embodiments, the amino acid sequence of the effector domain comprises an amino acid sequence at least 80%, 81%, 82%, 83%, 84%, 85%, 86%, 87%, 88%, 89%, 90%, 91%, 92%, 93%, 94%, 95%, 96%, 97%, 98%, 99%, or 100% identical to the amino acid sequence of the catalytic domain of SEQ ID NO: 74. In some embodiments, the amino acid sequence of the effector domain comprises an amino acid sequence at least 80%, 81%, 82%, 83%, 84%, 85%, 86%, 87%, 88%, 89%, 90%, 91%, 92%, 93%, 94%, 95%, 96%, 97%, 98%, 99%, or 100% identical to the amino acid sequence of the catalytic domain of SEQ ID NO: 75. In some embodiments, the amino acid sequence of the effector domain comprises an amino acid sequence at least 80%, 81%, 82%, 83%, 84%, 85%, 86%, 87%, 88%, 89%, 90%, 91%, 92%, 93%, 94%, 95%, 96%, 97%, 98%, 99%, or 100% identical to the amino acid sequence of the catalytic domain of SEQ ID NO: 76. In some embodiments, the amino acid sequence of the effector domain comprises an amino acid sequence at least 80%, 81%, 82%, 83%, 84%, 85%, 86%, 87%, 88%, 89%, 90%, 91%, 92%, 93%, 94%, 95%, 96%, 97%, 98%, 99%, or 100% identical to the amino acid sequence of the catalytic domain of SEQ ID NO: 77. In some embodiments, the amino acid sequence of the effector domain comprises an amino acid sequence at least 80%, 81%, 82%, 83%, 84%, 85%, 86%, 87%, 88%, 89%, 90%, 91%, 92%, 93%, 94%, 95%, 96%, 97%, 98%, 99%, or 100% identical to the amino acid sequence of the catalytic domain of SEQ ID NO: 78. In some embodiments, the amino acid sequence of the effector domain comprises an amino acid sequence at least 80%, 81%, 82%, 83%, 84%, 85%, 86%, 87%, 88%, 89%, 90%, 91%, 92%, 93%, 94%, 95%, 96%, 97%, 98%, 99%, or 100% identical to the amino acid sequence of the catalytic domain of SEQ ID NO: 79. In some embodiments, the amino acid sequence of the effector domain comprises an amino acid sequence at least 80%, 81%, 82%, 83%, 84%, 85%, 86%, 87%, 88%, 89%, 90%, 91%, 92%, 93%, 94%, 95%, 96%, 97%, 98%, 99%, or 100% identical to the amino acid sequence of the catalytic domain of SEQ ID NO: 80. In some embodiments, the amino acid sequence of the effector domain comprises an amino acid sequence at least 80%, 81%, 82%, 83%, 84%, 85%, 86%, 87%, 88%, 89%, 90%, 91%, 92%, 93%, 94%, 95%, 96%, 97%, 98%, 99%, or 100% identical to the amino acid sequence of the catalytic domain of SEQ ID NO: 81. In some embodiments, the amino acid sequence of the effector domain comprises an amino acid sequence at least 80%, 81%, 82%, 83%, 84%, 85%, 86%, 87%, 88%, 89%, 90%, 91%, 92%, 93%, 94%, 95%, 96%, 97%, 98%, 99%, or 100% identical to the amino acid sequence of the catalytic domain of SEQ ID NO: 82. In some embodiments, the amino acid sequence of the effector domain comprises an amino acid sequence at least 80%, 81%, 82%, 83%, 84%, 85%, 86%, 87%, 88%, 89%, 90%, 91%, 92%, 93%, 94%, 95%, 96%, 97%, 98%, 99%, or 100% identical to the amino acid sequence of the catalytic domain of SEQ ID NO: 83. In some embodiments, the amino acid sequence of the effector domain comprises an amino acid sequence at least 80%, 81%, 82%, 83%, 84%, 85%, 86%, 87%, 88%, 89%, 90%, 91%, 92%, 93%, 94%, 95%, 96%, 97%, 98%, 99%, or 100% identical to the amino acid sequence of the catalytic domain of SEQ ID NO: 84. In some embodiments, the amino acid sequence of the effector domain comprises an amino acid sequence at least 80%, 81%, 82%, 83%, 84%, 85%, 86%, 87%, 88%, 89%, 90%, 91%, 92%, 93%, 94%, 95%, 96%, 97%, 98%, 99%, or 100% identical to the amino acid sequence of the catalytic domain of SEQ ID NO: 85. In some embodiments, the amino acid sequence of the effector domain comprises an amino acid sequence at least 80%, 81%, 82%, 83%, 84%, 85%, 86%, 87%, 88%, 89%, 90%, 91%, 92%, 93%, 94%, 95%, 96%, 97%, 98%, 99%, or 100% identical to the amino acid sequence of the catalytic domain of SEQ ID NO: 86. In some embodiments, the amino acid sequence of the effector domain comprises an amino acid sequence at least 80%, 81%, 82%, 83%, 84%, 85%, 86%, 87%, 88%, 89%, 90%, 91%, 92%, 93%, 94%, 95%, 96%, 97%, 98%, 99%, or 100% identical to the amino acid sequence of the catalytic domain of SEQ ID NO: 87. In some embodiments, the amino acid sequence of the effector domain comprises an amino acid sequence at least 80%, 81%, 82%, 83%, 84%, 85%, 86%, 87%, 88%, 89%, 90%, 91%, 92%, 93%, 94%, 95%, 96%, 97%, 98%, 99%, or 100% identical to the amino acid sequence of the catalytic domain of SEQ ID NO: 88. In some embodiments, the amino acid sequence of the effector domain comprises an amino acid sequence at least 80%, 81%, 82%, 83%, 84%, 85%, 86%, 87%, 88%, 89%, 90%, 91%, 92%, 93%, 94%, 95%, 96%, 97%, 98%, 99%, or 100% identical to the amino acid sequence of the catalytic domain of SEQ ID NO: 89. In some embodiments, the amino acid sequence of the effector domain comprises an amino acid sequence at least 80%, 81%, 82%, 83%, 84%, 85%, 86%, 87%, 88%, 89%, 90%, 91%, 92%, 93%, 94%, 95%, 96%, 97%, 98%, 99%, or 100% identical to the amino acid sequence of the catalytic domain of SEQ ID NO: 90. In some embodiments, the amino acid sequence of the effector domain comprises an amino acid sequence at least 80%, 81%, 82%, 83%, 84%, 85%, 86%, 87%, 88%, 89%, 90%, 91%, 92%, 93%, 94%, 95%, 96%, 97%, 98%, 99%, or 100% identical to the amino acid sequence of the catalytic domain of SEQ ID NO: 91. In some embodiments, the amino acid sequence of the effector domain comprises an amino acid sequence at least 80%, 81%, 82%, 83%, 84%, 85%, 86%, 87%, 88%, 89%, 90%, 91%, 92%, 93%, 94%, 95%, 96%, 97%, 98%, 99%, or 100% identical to the amino acid sequence of the catalytic domain of SEQ ID NO: 92. In some embodiments, the amino acid sequence of the effector domain comprises an amino acid sequence at least 80%, 81%, 82%, 83%, 84%, 85%, 86%, 87%, 88%, 89%, 90%, 91%, 92%, 93%, 94%, 95%, 96%, 97%, 98%, 99%, or 100% identical to the amino acid sequence of the catalytic domain of SEQ ID NO: 93. In some embodiments, the amino acid sequence of the effector domain comprises an amino acid sequence at least 80%, 81%, 82%, 83%, 84%, 85%, 86%, 87%, 88%, 89%, 90%, 91%, 92%, 93%, 94%, 95%, 96%, 97%, 98%, 99%, or 100% identical to the amino acid sequence of the catalytic domain of SEQ ID NO: 94. In some embodiments, the amino acid sequence of the effector domain comprises an amino acid sequence at least 80%, 81%, 82%, 83%, 84%, 85%, 86%, 87%, 88%, 89%, 90%, 91%, 92%, 93%, 94%, 95%, 96%, 97%, 98%, 99%, or 100% identical to the amino acid sequence of the catalytic domain of SEQ ID NO: 95. In some embodiments, the amino acid sequence of the effector domain comprises an amino acid sequence at least 80%, 81%, 82%, 83%, 84%, 85%, 86%, 87%, 88%, 89%, 90%, 91%, 92%, 93%, 94%, 95%, 96%, 97%, 98%, 99%, or 100% identical to the amino acid sequence of the catalytic domain of SEQ ID NO: 96. In some embodiments, the amino acid sequence of the effector domain comprises an amino acid sequence at least 80%, 81%, 82%, 83%, 84%, 85%, 86%, 87%, 88%, 89%, 90%, 91%, 92%, 93%, 94%, 95%, 96%, 97%, 98%, 99%, or 100% identical to the amino acid sequence of the catalytic domain of SEQ ID NO: 97. In some embodiments, the amino acid sequence of the effector domain comprises an amino acid sequence at least 80%, 81%, 82%, 83%, 84%, 85%, 86%, 87%, 88%, 89%, 90%, 91%, 92%, 93%, 94%, 95%, 96%, 97%, 98%, 99%, or 100% identical to the amino acid sequence of the catalytic domain of SEQ ID NO: 98. In some embodiments, the amino acid sequence of the effector domain comprises an amino acid sequence at least 80%, 81%, 82%, 83%, 84%, 85%, 86%, 87%, 88%, 89%, 90%, 91%, 92%, 93%, 94%, 95%, 96%, 97%, 98%, 99%, or 100% identical to the amino acid sequence of the catalytic domain of SEQ ID NO: 99. In some embodiments, the amino acid sequence of the effector domain comprises an amino acid sequence at least 80%, 81%, 82%, 83%, 84%, 85%, 86%, 87%, 88%, 89%, 90%, 91%, 92%, 93%, 94%, 95%, 96%, 97%, 98%, 99%, or 100% identical to the amino acid sequence of the catalytic domain of SEQ ID NO: 100. In some embodiments, the amino acid sequence of the effector domain comprises an amino acid sequence at least 80%, 81%, 82%, 83%, 84%, 85%, 86%, 87%, 88%, 89%, 90%, 91%, 92%, 93%, 94%, 95%, 96%, 97%, 98%, 99%, or 100% identical to the amino acid sequence of the catalytic domain of SEQ ID NO: 101. In some embodiments, the amino acid sequence of the effector domain comprises an amino acid sequence at least 80%, 81%, 82%, 83%, 84%, 85%, 86%, 87%, 88%, 89%, 90%, 91%, 92%, 93%, 94%, 95%, 96%, 97%, 98%, 99%, or 100% identical to the amino acid sequence of the catalytic domain of SEQ ID NO: 102. In some embodiments, the amino acid sequence of the effector domain comprises an amino acid sequence at least 80%, 81%, 82%, 83%, 84%, 85%, 86%, 87%, 88%, 89%, 90%, 91%, 92%, 93%, 94%, 95%, 96%, 97%, 98%, 99%, or 100% identical to the amino acid sequence of the catalytic domain of SEQ ID NO: 103. In some embodiments, the amino acid sequence of the effector domain comprises an amino acid sequence at least 80%, 81%, 82%, 83%, 84%, 85%, 86%, 87%, 88%, 89%, 90%, 91%, 92%, 93%, 94%, 95%, 96%, 97%, 98%, 99%, or 100% identical to the amino acid sequence of the catalytic domain of SEQ ID NO: 104. In some embodiments, the amino acid sequence of the effector domain comprises an amino acid sequence at least 80%, 81%, 82%, 83%, 84%, 85%, 86%, 87%, 88%, 89%, 90%, 91%, 92%, 93%, 94%, 95%, 96%, 97%, 98%, 99%, or 100% identical to the amino acid sequence of the catalytic domain of SEQ ID NO: 105. In some embodiments, the amino acid sequence of the effector domain comprises an amino acid sequence at least 80%, 81%, 82%, 83%, 84%, 85%, 86%, 87%, 88%, 89%, 90%, 91%, 92%, 93%, 94%, 95%, 96%, 97%, 98%, 99%, or 100% identical to the amino acid sequence of the catalytic domain of SEQ ID NO: 106. In some embodiments, the amino acid sequence of the effector domain comprises an amino acid sequence at least 80%, 81%, 82%, 83%, 84%, 85%, 86%, 87%, 88%, 89%, 90%, 91%, 92%, 93%, 94%, 95%, 96%, 97%, 98%, 99%, or 100% identical to the amino acid sequence of the catalytic domain of SEQ ID NO: 107. In some embodiments, the amino acid sequence of the effector domain comprises an amino acid sequence at least 80%, 81%, 82%, 83%, 84%, 85%, 86%, 87%, 88%, 89%, 90%, 91%, 92%, 93%, 94%, 95%, 96%, 97%, 98%, 99%, or 100% identical to the amino acid sequence of the catalytic domain of SEQ ID NO: 108. In some embodiments, the amino acid sequence of the effector domain comprises an amino acid sequence at least 80%, 81%, 82%, 83%, 84%, 85%, 86%, 87%, 88%, 89%, 90%, 91%, 92%, 93%, 94%, 95%, 96%, 97%, 98%, 99%, or 100% identical to the amino acid sequence of the catalytic domain of SEQ ID NO: 109. In some embodiments, the amino acid sequence of the effector domain comprises an amino acid sequence at least 80%, 81%, 82%, 83%, 84%, 85%, 86%, 87%, 88%, 89%, 90%, 91%, 92%, 93%, 94%, 95%, 96%, 97%, 98%, 99%, or 100% identical to the amino acid sequence of the catalytic domain of SEQ ID NO: 110. In some embodiments, the amino acid sequence of the effector domain comprises an amino acid sequence at least 80%, 81%, 82%, 83%, 84%, 85%, 86%, 87%, 88%, 89%, 90%, 91%, 92%, 93%, 94%, 95%, 96%, 97%, 98%, 99%, or 100% identical to the amino acid sequence of the catalytic domain of SEQ ID NO: 111. In some embodiments, the amino acid sequence of the effector domain comprises an amino acid sequence at least 80%, 81%, 82%, 83%, 84%, 85%, 86%, 87%, 88%, 89%, 90%, 91%, 92%, 93%, 94%, 95%, 96%, 97%, 98%, 99%, or 100% identical to the amino acid sequence of the catalytic domain of SEQ ID NO: 112.

[0209] In some embodiments, the catalytic domain is derived from a deubiquitinase that comprises an amino acid sequence at least 80%, 81%, 82%, 83%, 84%, 85%, 86%, 87%, 88%, 89%, 90%, 91%, 92%, 93%, 94%, 95%, 96%, 97%, 98%, 99%, or 100% identical to the amino acid sequence of any one of SEQ ID NOS: 1-112. In some embodiments, the catalytic domain is derived from a deubiquitinase that consists of an amino acid sequence at least 80%, 81%, 82%, 83%, 84%, 85%, 86%, 87%, 88%, 89%, 90%, 91%, 92%, 93%, 94%, 95%, 96%, 97%, 98%, 99%, or 100% identical to the amino acid sequence of any one of SEQ ID NOS: 1-112.

[0210] In some embodiments, the catalytic domain is derived from a deubiquitinase that consists of an amino acid sequence at least 80%, 81%, 82%, 83%, 84%, 85%, 86%, 87%, 88%, 89%, 90%, 91%, 92%, 93%, 94%, 95%, 96%, 97%, 98%, 99%, or 100% identical to the amino acid sequence of SEQ ID NO: 1. In some embodiments, the catalytic domain is derived from a deubiquitinase that consists of an amino acid sequence at least 80%, 81%, 82%, 83%, 84%, 85%, 86%, 87%, 88%, 89%, 90%, 91%, 92%, 93%, 94%, 95%, 96%, 97%, 98%, 99%, or 100% identical to the amino acid sequence of SEQ ID NO: 2. In some embodiments, the catalytic domain is derived from a deubiquitinase that consists of an amino acid sequence at least 80%, 81%, 82%, 83%, 84%, 85%, 86%, 87%, 88%, 89%, 90%, 91%, 92%, 93%, 94%, 95%, 96%, 97%, 98%, 99%, or 100% identical to the amino acid sequence of SEQ ID NO: 3. In some embodiments, the catalytic domain is derived from a deubiquitinase that consists of an amino acid sequence at least 80%, 81%, 82%, 83%, 84%, 85%, 86%, 87%, 88%, 89%, 90%, 91%, 92%, 93%, 94%, 95%, 96%, 97%, 98%, 99%, or 100% identical to the amino acid sequence of SEQ ID NO: 4. In some embodiments, the catalytic domain is derived from a deubiquitinase that consists of an amino acid sequence at least 80%, 81%, 82%, 83%, 84%, 85%, 86%, 87%, 88%, 89%, 90%, 91%, 92%, 93%, 94%, 95%, 96%, 97%, 98%, 99%, or 100% identical to the amino acid sequence of SEQ ID NO: 5. In some embodiments, the catalytic domain is derived from a deubiquitinase that consists of an amino acid sequence at least 80%, 81%, 82%, 83%, 84%, 85%, 86%, 87%, 88%, 89%, 90%, 91%, 92%, 93%, 94%, 95%, 96%, 97%, 98%, 99%, or 100% identical to the amino acid sequence of SEQ ID NO: 6. In some embodiments, the catalytic domain is derived from a deubiquitinase that consists of an amino acid sequence at least 80%, 81%, 82%, 83%, 84%, 85%, 86%, 87%, 88%, 89%, 90%, 91%, 92%, 93%, 94%, 95%, 96%, 97%, 98%, 99%, or 100% identical to the amino acid sequence of SEQ ID NO: 7. In some embodiments, the catalytic domain is derived from a deubiquitinase that consists of an amino acid sequence at least 80%, 81%, 82%, 83%, 84%, 85%, 86%, 87%, 88%, 89%, 90%, 91%, 92%, 93%, 94%, 95%, 96%, 97%, 98%, 99%, or 100% identical to the amino acid sequence of SEQ ID NO: 8. In some embodiments, the catalytic domain is derived from a deubiquitinase that consists of an amino acid sequence at least 80%, 81%, 82%, 83%, 84%, 85%, 86%, 87%, 88%, 89%, 90%, 91%, 92%, 93%, 94%, 95%, 96%, 97%, 98%, 99%, or 100% identical to the amino acid sequence of SEQ ID NO: 9. In some embodiments, the catalytic domain is derived from a deubiquitinase that consists of an amino acid sequence at least 80%, 81%, 82%, 83%, 84%, 85%, 86%, 87%, 88%, 89%, 90%, 91%, 92%, 93%, 94%, 95%, 96%, 97%, 98%, 99%, or 100% identical to the amino acid sequence of SEQ ID NO: 10. In some embodiments, the catalytic domain is derived from a deubiquitinase that consists of an amino acid sequence at least 80%, 81%, 82%, 83%, 84%, 85%, 86%, 87%, 88%, 89%, 90%, 91%, 92%, 93%, 94%, 95%, 96%, 97%, 98%, 99%, or 100% identical to the amino acid sequence of SEQ ID NO: 11. In some embodiments, the catalytic domain is derived from a deubiquitinase that consists of an amino acid sequence at least 80%, 81%, 82%, 83%, 84%, 85%, 86%, 87%, 88%, 89%, 90%, 91%, 92%, 93%, 94%, 95%, 96%, 97%, 98%, 99%, or 100% identical to the amino acid sequence of SEQ ID NO: 12. In some embodiments, the catalytic domain is derived from a deubiquitinase that consists of an amino acid sequence at least 80%, 81%, 82%, 83%, 84%, 85%, 86%, 87%, 88%, 89%, 90%, 91%, 92%, 93%, 94%, 95%, 96%, 97%, 98%, 99%, or 100% identical to the amino acid sequence of SEQ ID NO: 13. In some embodiments, the catalytic domain is derived from a deubiquitinase that consists of an amino acid sequence at least 80%, 81%, 82%, 83%, 84%, 85%, 86%, 87%, 88%, 89%, 90%, 91%, 92%, 93%, 94%, 95%, 96%, 97%, 98%, 99%, or 100% identical to the amino acid sequence of SEQ ID NO: 14. In some embodiments, the catalytic domain is derived from a deubiquitinase that consists of an amino acid sequence at least 80%, 81%, 82%, 83%, 84%, 85%, 86%, 87%, 88%, 89%, 90%, 91%, 92%, 93%, 94%, 95%, 96%, 97%, 98%, 99%, or 100% identical to the amino acid sequence of SEQ ID NO: 15. In some embodiments, the catalytic domain is derived from a deubiquitinase that consists of an amino acid sequence at least 80%, 81%, 82%, 83%, 84%, 85%, 86%, 87%, 88%, 89%, 90%, 91%, 92%, 93%, 94%, 95%, 96%, 97%, 98%, 99%, or 100% identical to the amino acid sequence of SEQ ID NO: 16. In some embodiments, the catalytic domain is derived from a deubiquitinase that consists of an amino acid sequence at least 80%, 81%, 82%, 83%, 84%, 85%, 86%, 87%, 88%, 89%, 90%, 91%, 92%, 93%, 94%, 95%, 96%, 97%, 98%, 99%, or 100% identical to the amino acid sequence of SEQ ID NO: 17. In some embodiments, the catalytic domain is derived from a deubiquitinase that consists of an amino acid sequence at least 80%, 81%, 82%, 83%, 84%, 85%, 86%, 87%, 88%, 89%, 90%, 91%, 92%, 93%, 94%, 95%, 96%, 97%, 98%, 99%, or 100% identical to the amino acid sequence of SEQ ID NO: 18. In some embodiments, the catalytic domain is derived from a deubiquitinase that consists of an amino acid sequence at least 80%, 81%, 82%, 83%, 84%, 85%, 86%, 87%, 88%, 89%, 90%, 91%, 92%, 93%, 94%, 95%, 96%, 97%, 98%, 99%, or 100% identical to the amino acid sequence of SEQ ID NO: 19. In some embodiments, the catalytic domain is derived from a deubiquitinase that consists of an amino acid sequence at least 80%, 81%, 82%, 83%, 84%, 85%, 86%, 87%, 88%, 89%, 90%, 91%, 92%, 93%, 94%, 95%, 96%, 97%, 98%, 99%, or 100% identical to the amino acid sequence of SEQ ID NO: 20. In some embodiments, the catalytic domain is derived from a deubiquitinase that consists of an amino acid sequence at least 80%, 81%, 82%, 83%, 84%, 85%, 86%, 87%, 88%, 89%, 90%, 91%, 92%, 93%, 94%, 95%, 96%, 97%, 98%, 99%, or 100% identical to the amino acid sequence of SEQ ID NO: 21. In some embodiments, the catalytic domain is derived from a deubiquitinase that consists of an amino acid sequence at least 80%, 81%, 82%, 83%, 84%, 85%, 86%, 87%, 88%, 89%, 90%, 91%, 92%, 93%, 94%, 95%, 96%, 97%, 98%, 99%, or 100% identical to the amino acid sequence of SEQ ID NO: 22. In some embodiments, the catalytic domain is derived from a deubiquitinase that consists of an amino acid sequence at least 80%, 81%, 82%, 83%, 84%, 85%, 86%, 87%, 88%, 89%, 90%, 91%, 92%, 93%, 94%, 95%, 96%, 97%, 98%, 99%, or 100% identical to the amino acid sequence of SEQ ID NO: 23. In some embodiments, the catalytic domain is derived from a deubiquitinase that consists of an amino acid sequence at least 80%, 81%, 82%, 83%, 84%, 85%, 86%, 87%, 88%, 89%, 90%, 91%, 92%, 93%, 94%, 95%, 96%, 97%, 98%, 99%, or 100% identical to the amino acid sequence of SEQ ID NO: 24. In some embodiments, the catalytic domain is derived from a deubiquitinase that consists of an amino acid sequence at least 80%, 81%, 82%, 83%, 84%, 85%, 86%, 87%, 88%, 89%, 90%, 91%, 92%, 93%, 94%, 95%, 96%, 97%, 98%, 99%, or 100% identical to the amino acid sequence of SEQ ID NO: 25. In some embodiments, the catalytic domain is derived from a deubiquitinase that consists of an amino acid sequence at least 80%, 81%, 82%, 83%, 84%, 85%, 86%, 87%, 88%, 89%, 90%, 91%, 92%, 93%, 94%, 95%, 96%, 97%, 98%, 99%, or 100% identical to the amino acid sequence of SEQ ID NO: 26. In some embodiments, the catalytic domain is derived from a deubiquitinase that consists of an amino acid sequence at least 80%, 81%, 82%, 83%, 84%, 85%, 86%, 87%, 88%, 89%, 90%, 91%, 92%, 93%, 94%, 95%, 96%, 97%, 98%, 99%, or 100% identical to the amino acid sequence of SEQ ID NO: 27. In some embodiments, the catalytic domain is derived from a deubiquitinase that consists of an amino acid sequence at least 80%, 81%, 82%, 83%, 84%, 85%, 86%, 87%, 88%, 89%, 90%, 91%, 92%, 93%, 94%, 95%, 96%, 97%, 98%, 99%, or 100% identical to the amino acid sequence of SEQ ID NO: 28. In some embodiments, the catalytic domain is derived from a deubiquitinase that consists of an amino acid sequence at least 80%, 81%, 82%, 83%, 84%, 85%, 86%, 87%, 88%, 89%, 90%, 91%, 92%, 93%, 94%, 95%, 96%, 97%, 98%, 99%, or 100% identical to the amino acid sequence of SEQ ID NO: 29. In some embodiments, the catalytic domain is derived from a deubiquitinase that consists of an amino acid sequence at least 80%, 81%, 82%, 83%, 84%, 85%, 86%, 87%, 88%, 89%, 90%, 91%, 92%, 93%, 94%, 95%, 96%, 97%, 98%, 99%, or 100% identical to the amino acid sequence of SEQ ID NO: 30. In some embodiments, the catalytic domain is derived from a deubiquitinase that consists of an amino acid sequence at least 80%, 81%, 82%, 83%, 84%, 85%, 86%, 87%, 88%, 89%, 90%, 91%, 92%, 93%, 94%, 95%, 96%, 97%, 98%, 99%, or 100% identical to the amino acid sequence of SEQ ID NO: 31. In some embodiments, the catalytic domain is derived from a deubiquitinase that consists of an amino acid sequence at least 80%, 81%, 82%, 83%, 84%, 85%, 86%, 87%, 88%, 89%, 90%, 91%, 92%, 93%, 94%, 95%, 96%, 97%, 98%, 99%, or 100% identical to the amino acid sequence of SEQ ID NO: 32. In some embodiments, the catalytic domain is derived from a deubiquitinase that consists of an amino acid sequence at least 80%, 81%, 82%, 83%, 84%, 85%, 86%, 87%, 88%, 89%, 90%, 91%, 92%, 93%, 94%, 95%, 96%, 97%, 98%, 99%, or 100% identical to the amino acid sequence of SEQ ID NO: 33. In some embodiments, the catalytic domain is derived from a deubiquitinase that consists of an amino acid sequence at least 80%, 81%, 82%, 83%, 84%, 85%, 86%, 87%, 88%, 89%, 90%, 91%, 92%, 93%, 94%, 95%, 96%, 97%, 98%, 99%, or 100% identical to the amino acid sequence of SEQ ID NO: 34. In some embodiments, the catalytic domain is derived from a deubiquitinase that consists of an amino acid sequence at least 80%, 81%, 82%, 83%, 84%, 85%, 86%, 87%, 88%, 89%, 90%, 91%, 92%, 93%, 94%, 95%, 96%, 97%, 98%, 99%, or 100% identical to the amino acid sequence of SEQ ID NO: 35. In some embodiments, the catalytic domain is derived from a deubiquitinase that consists of an amino acid sequence at least 80%, 81%, 82%, 83%, 84%, 85%, 86%, 87%, 88%, 89%, 90%, 91%, 92%, 93%, 94%, 95%, 96%, 97%, 98%, 99%, or 100% identical to the amino acid sequence of SEQ ID NO: 36. In some embodiments, the catalytic domain is derived from a deubiquitinase that consists of an amino acid sequence at least 80%, 81%, 82%, 83%, 84%, 85%, 86%, 87%, 88%, 89%, 90%, 91%, 92%, 93%, 94%, 95%, 96%, 97%, 98%, 99%, or 100% identical to the amino acid sequence of SEQ ID NO: 37. In some embodiments, the catalytic domain is derived from a deubiquitinase that consists of an amino acid sequence at least 80%, 81%, 82%, 83%, 84%, 85%, 86%, 87%, 88%, 89%, 90%, 91%, 92%, 93%, 94%, 95%, 96%, 97%, 98%, 99%, or 100% identical to the amino acid sequence of SEQ ID NO: 38. In some embodiments, the catalytic domain is derived from a deubiquitinase that consists of an amino acid sequence at least 80%, 81%, 82%, 83%, 84%, 85%, 86%, 87%, 88%, 89%, 90%, 91%, 92%, 93%, 94%, 95%, 96%, 97%, 98%, 99%, or 100% identical to the amino acid sequence of SEQ ID NO: 39. In some embodiments, the catalytic domain is derived from a deubiquitinase that consists of an amino acid sequence at least 80%, 81%, 82%, 83%, 84%, 85%, 86%, 87%, 88%, 89%, 90%, 91%, 92%, 93%, 94%, 95%, 96%, 97%, 98%, 99%, or 100% identical to the amino acid sequence of SEQ ID NO: 40. In some embodiments, the catalytic domain is derived from a deubiquitinase that consists of an amino acid sequence at least 80%, 81%, 82%, 83%, 84%, 85%, 86%, 87%, 88%, 89%, 90%, 91%, 92%, 93%, 94%, 95%, 96%, 97%, 98%, 99%, or 100% identical to the amino acid sequence of SEQ ID NO: 41. In some embodiments, the catalytic domain is derived from a deubiquitinase that consists of an amino acid sequence at least 80%, 81%, 82%, 83%, 84%, 85%, 86%, 87%, 88%, 89%, 90%, 91%, 92%, 93%, 94%, 95%, 96%, 97%, 98%, 99%, or 100% identical to the amino acid sequence of SEQ ID NO: 42. In some embodiments, the catalytic domain is derived from a deubiquitinase that consists of an amino acid sequence at least 80%, 81%, 82%, 83%, 84%, 85%, 86%, 87%, 88%, 89%, 90%, 91%, 92%, 93%, 94%, 95%, 96%, 97%, 98%, 99%, or 100% identical to the amino acid sequence of SEQ ID NO: 43. In some embodiments, the catalytic domain is derived from a deubiquitinase that consists of an amino acid sequence at least 80%, 81%, 82%, 83%, 84%, 85%, 86%, 87%, 88%, 89%, 90%, 91%, 92%, 93%, 94%, 95%, 96%, 97%, 98%, 99%, or 100% identical to the amino acid sequence of SEQ ID NO: 44. In some embodiments, the catalytic domain is derived from a deubiquitinase that consists of an amino acid sequence at least 80%, 81%, 82%, 83%, 84%, 85%, 86%, 87%, 88%, 89%, 90%, 91%, 92%, 93%, 94%, 95%, 96%, 97%, 98%, 99%, or 100% identical to the amino acid sequence of SEQ ID NO: 45. In some embodiments, the catalytic domain is derived from a deubiquitinase that consists of an amino acid sequence at least 80%, 81%, 82%, 83%, 84%, 85%, 86%, 87%, 88%, 89%, 90%, 91%, 92%, 93%, 94%, 95%, 96%, 97%, 98%, 99%, or 100% identical to the amino acid sequence of SEQ ID NO: 46. In some embodiments, the catalytic domain is derived from a deubiquitinase that consists of an amino acid sequence at least 80%, 81%, 82%, 83%, 84%, 85%, 86%, 87%, 88%, 89%, 90%, 91%, 92%, 93%, 94%, 95%, 96%, 97%, 98%, 99%, or 100% identical to the amino acid sequence of SEQ ID NO: 47. In some embodiments, the catalytic domain is derived from a deubiquitinase that consists of an amino acid sequence at least 80%, 81%, 82%, 83%, 84%, 85%, 86%, 87%, 88%, 89%, 90%, 91%, 92%, 93%, 94%, 95%, 96%, 97%, 98%, 99%, or 100% identical to the amino acid sequence of SEQ ID NO: 48. In some embodiments, the catalytic domain is derived from a deubiquitinase that consists of an amino acid sequence at least 80%, 81%, 82%, 83%, 84%, 85%, 86%, 87%, 88%, 89%, 90%, 91%, 92%, 93%, 94%, 95%, 96%, 97%, 98%, 99%, or 100% identical to the amino acid sequence of SEQ ID NO: 49. In some embodiments, the catalytic domain is derived from a deubiquitinase that consists of an amino acid sequence at least 80%, 81%, 82%, 83%, 84%, 85%, 86%, 87%, 88%, 89%, 90%, 91%, 92%, 93%, 94%, 95%, 96%, 97%, 98%, 99%, or 100% identical to the amino acid sequence of SEQ ID NO: 50. In some embodiments, the catalytic domain is derived from a deubiquitinase that consists of an amino acid sequence at least 80%, 81%, 82%, 83%, 84%, 85%, 86%, 87%, 88%, 89%, 90%, 91%, 92%, 93%, 94%, 95%, 96%, 97%, 98%, 99%, or 100% identical to the amino acid sequence of SEQ ID NO: 51. In some embodiments, the catalytic domain is derived from a deubiquitinase that consists of an amino acid sequence at least 80%, 81%, 82%, 83%, 84%, 85%, 86%, 87%, 88%, 89%, 90%, 91%, 92%, 93%, 94%, 95%, 96%, 97%, 98%, 99%, or 100% identical to the amino acid sequence of SEQ ID NO: 52. In some embodiments, the catalytic domain is derived from a deubiquitinase that consists of an amino acid sequence at least 80%, 81%, 82%, 83%, 84%, 85%, 86%, 87%, 88%, 89%, 90%, 91%, 92%, 93%, 94%, 95%, 96%, 97%, 98%, 99%, or 100% identical to the amino acid sequence of SEQ ID NO: 53. In some embodiments, the catalytic domain is derived from a deubiquitinase that consists of an amino acid sequence at least 80%, 81%, 82%, 83%, 84%, 85%, 86%, 87%, 88%, 89%, 90%, 91%, 92%, 93%, 94%, 95%, 96%, 97%, 98%, 99%, or 100% identical to the amino acid sequence of SEQ ID NO: 54. In some embodiments, the catalytic domain is derived from a deubiquitinase that consists of an amino acid sequence at least 80%, 81%, 82%, 83%, 84%, 85%, 86%, 87%, 88%, 89%, 90%, 91%, 92%, 93%, 94%, 95%, 96%, 97%, 98%, 99%, or 100% identical to the amino acid sequence of SEQ ID NO: 55. In some embodiments, the catalytic domain is derived from a deubiquitinase that consists of an amino acid sequence at least 80%, 81%, 82%, 83%, 84%, 85%, 86%, 87%, 88%, 89%, 90%, 91%, 92%, 93%, 94%, 95%, 96%, 97%, 98%, 99%, or 100% identical to the amino acid sequence of SEQ ID NO: 56. In some embodiments, the catalytic domain is derived from a deubiquitinase that consists of an amino acid sequence at least 80%, 81%, 82%, 83%, 84%, 85%, 86%, 87%, 88%, 89%, 90%, 91%, 92%, 93%, 94%, 95%, 96%, 97%, 98%, 99%, or 100% identical to the amino acid sequence of SEQ ID NO: 57. In some embodiments, the catalytic domain is derived from a deubiquitinase that consists of an amino acid sequence at least 80%, 81%, 82%, 83%, 84%, 85%, 86%, 87%, 88%, 89%, 90%, 91%, 92%, 93%, 94%, 95%, 96%, 97%, 98%, 99%, or 100% identical to the amino acid sequence of SEQ ID NO: 58. In some embodiments, the catalytic domain is derived from a deubiquitinase that consists of an amino acid sequence at least 80%, 81%, 82%, 83%, 84%, 85%, 86%, 87%, 88%, 89%, 90%, 91%, 92%, 93%, 94%, 95%, 96%, 97%, 98%, 99%, or 100% identical to the amino acid sequence of SEQ ID NO: 59. In some embodiments, the catalytic domain is derived from a deubiquitinase that consists of an amino acid sequence at least 80%, 81%, 82%, 83%, 84%, 85%, 86%, 87%, 88%, 89%, 90%, 91%, 92%, 93%, 94%, 95%, 96%, 97%, 98%, 99%, or 100% identical to the amino acid sequence of SEQ ID NO: 60. In some embodiments, the catalytic domain is derived from a deubiquitinase that consists of an amino acid sequence at least 80%, 81%, 82%, 83%, 84%, 85%, 86%, 87%, 88%, 89%, 90%, 91%, 92%, 93%, 94%, 95%, 96%, 97%, 98%, 99%, or 100% identical to the amino acid sequence of SEQ ID NO: 61. In some embodiments, the catalytic domain is derived from a deubiquitinase that consists of an amino acid sequence at least 80%, 81%, 82%, 83%, 84%, 85%, 86%, 87%, 88%, 89%, 90%, 91%, 92%, 93%, 94%, 95%, 96%, 97%, 98%, 99%, or 100% identical to the amino acid sequence of SEQ ID NO: 62. In some embodiments, the catalytic domain is derived from a deubiquitinase that consists of an amino acid sequence at least 80%, 81%, 82%, 83%, 84%, 85%, 86%, 87%, 88%, 89%, 90%, 91%, 92%, 93%, 94%, 95%, 96%, 97%, 98%, 99%, or 100% identical to the amino acid sequence of SEQ ID NO: 63. In some embodiments, the catalytic domain is derived from a deubiquitinase that consists of an amino acid sequence at least 80%, 81%, 82%, 83%, 84%, 85%, 86%, 87%, 88%, 89%, 90%, 91%, 92%, 93%, 94%, 95%, 96%, 97%, 98%, 99%, or 100% identical to the amino acid sequence of SEQ ID NO: 64. In some embodiments, the catalytic domain is derived from a deubiquitinase that consists of an amino acid sequence at least 80%, 81%, 82%, 83%, 84%, 85%, 86%, 87%, 88%, 89%, 90%, 91%, 92%, 93%, 94%, 95%, 96%, 97%, 98%, 99%, or 100% identical to the amino acid sequence of SEQ ID NO: 65. In some embodiments, the catalytic domain is derived from a deubiquitinase that consists of an amino acid sequence at least 80%, 81%, 82%, 83%, 84%, 85%, 86%, 87%, 88%, 89%, 90%, 91%, 92%, 93%, 94%, 95%, 96%, 97%, 98%, 99%, or 100% identical to the amino acid sequence of SEQ ID NO: 66. In some embodiments, the catalytic domain is derived from a deubiquitinase that consists of an amino acid sequence at least 80%, 81%, 82%, 83%, 84%, 85%, 86%, 87%, 88%, 89%, 90%, 91%, 92%, 93%, 94%, 95%, 96%, 97%, 98%, 99%, or 100% identical to the amino acid sequence of SEQ ID NO: 67. In some embodiments, the catalytic domain is derived from a deubiquitinase that consists of an amino acid sequence at least 80%, 81%, 82%, 83%, 84%, 85%, 86%, 87%, 88%, 89%, 90%, 91%, 92%, 93%, 94%, 95%, 96%, 97%, 98%, 99%, or 100% identical to the amino acid sequence of SEQ ID NO: 68. In some embodiments, the catalytic domain is derived from a deubiquitinase that consists of an amino acid sequence at least 80%, 81%, 82%, 83%, 84%, 85%, 86%, 87%, 88%, 89%, 90%, 91%, 92%, 93%, 94%, 95%, 96%, 97%, 98%, 99%, or 100% identical to the amino acid sequence of SEQ ID NO: 69. In some embodiments, the catalytic domain is derived from a deubiquitinase that consists of an amino acid sequence at least 80%, 81%, 82%, 83%, 84%, 85%, 86%, 87%, 88%, 89%, 90%, 91%, 92%, 93%, 94%, 95%, 96%, 97%, 98%, 99%, or 100% identical to the amino acid sequence of SEQ ID NO: 70. In some embodiments, the catalytic domain is derived from a deubiquitinase that consists of an amino acid sequence at least 80%, 81%, 82%, 83%, 84%, 85%, 86%, 87%, 88%, 89%, 90%, 91%, 92%, 93%, 94%, 95%, 96%, 97%, 98%, 99%, or 100% identical to the amino acid sequence of SEQ ID NO: 71. In some embodiments, the catalytic domain is derived from a deubiquitinase that consists of an amino acid sequence at least 80%, 81%, 82%, 83%, 84%, 85%, 86%, 87%, 88%, 89%, 90%, 91%, 92%, 93%, 94%, 95%, 96%, 97%, 98%, 99%, or 100% identical to the amino acid sequence of SEQ ID NO: 72. In some embodiments, the catalytic domain is derived from a deubiquitinase that consists of an amino acid sequence at least 80%, 81%, 82%, 83%, 84%, 85%, 86%, 87%, 88%, 89%, 90%, 91%, 92%, 93%, 94%, 95%, 96%, 97%, 98%, 99%, or 100% identical to the amino acid sequence of SEQ ID NO: 73. In some embodiments, the catalytic domain is derived from a deubiquitinase that consists of an amino acid sequence at least 80%, 81%, 82%, 83%, 84%, 85%, 86%, 87%, 88%, 89%, 90%, 91%, 92%, 93%, 94%, 95%, 96%, 97%, 98%, 99%, or 100% identical to the amino acid sequence of SEQ ID NO: 74. In some embodiments, the catalytic domain is derived from a deubiquitinase that consists of an amino acid sequence at least 80%, 81%, 82%, 83%, 84%, 85%, 86%, 87%, 88%, 89%, 90%, 91%, 92%, 93%, 94%, 95%, 96%, 97%, 98%, 99%, or 100% identical to the amino acid sequence of SEQ ID NO: 75. In some embodiments, the catalytic domain is derived from a deubiquitinase that consists of an amino acid sequence at least 80%, 81%, 82%, 83%, 84%, 85%, 86%, 87%, 88%, 89%, 90%, 91%, 92%, 93%, 94%, 95%, 96%, 97%, 98%, 99%, or 100% identical to the amino acid sequence of SEQ ID NO: 76. In some embodiments, the catalytic domain is derived from a deubiquitinase that consists of an amino acid sequence at least 80%, 81%, 82%, 83%, 84%, 85%, 86%, 87%, 88%, 89%, 90%, 91%, 92%, 93%, 94%, 95%, 96%, 97%, 98%, 99%, or 100% identical to the amino acid sequence of SEQ ID NO: 77. In some embodiments, the catalytic domain is derived from a deubiquitinase that consists of an amino acid sequence at least 80%, 81%, 82%, 83%, 84%, 85%, 86%, 87%, 88%, 89%, 90%, 91%, 92%, 93%, 94%, 95%, 96%, 97%, 98%, 99%, or 100% identical to the amino acid sequence of SEQ ID NO: 78. In some embodiments, the catalytic domain is derived from a deubiquitinase that consists of an amino acid sequence at least 80%, 81%, 82%, 83%, 84%, 85%, 86%, 87%, 88%, 89%, 90%, 91%, 92%, 93%, 94%, 95%, 96%, 97%, 98%, 99%, or 100% identical to the amino acid sequence of SEQ ID NO: 79. In some embodiments, the catalytic domain is derived from a deubiquitinase that consists of an amino acid sequence at least 80%, 81%, 82%, 83%, 84%, 85%, 86%, 87%, 88%, 89%, 90%, 91%, 92%, 93%, 94%, 95%, 96%, 97%, 98%, 99%, or 100% identical to the amino acid sequence of SEQ ID NO: 80. In some embodiments, the catalytic domain is derived from a deubiquitinase that consists of an amino acid sequence at least 80%, 81%, 82%, 83%, 84%, 85%, 86%, 87%, 88%, 89%, 90%, 91%, 92%, 93%, 94%, 95%, 96%, 97%, 98%, 99%, or 100% identical to the amino acid sequence of SEQ ID NO: 81. In some embodiments, the catalytic domain is derived from a deubiquitinase that consists of an amino acid sequence at least 80%, 81%, 82%, 83%, 84%, 85%, 86%, 87%, 88%, 89%, 90%, 91%, 92%, 93%, 94%, 95%, 96%, 97%, 98%, 99%, or 100% identical to the amino acid sequence of SEQ ID NO: 82. In some embodiments, the catalytic domain is derived from a deubiquitinase that consists of an amino acid sequence at least 80%, 81%, 82%, 83%, 84%, 85%, 86%, 87%, 88%, 89%, 90%, 91%, 92%, 93%, 94%, 95%, 96%, 97%, 98%, 99%, or 100% identical to the amino acid sequence of SEQ ID NO: 83. In some embodiments, the catalytic domain is derived from a deubiquitinase that consists of an amino acid sequence at least 80%, 81%, 82%, 83%, 84%, 85%, 86%, 87%, 88%, 89%, 90%, 91%, 92%, 93%, 94%, 95%, 96%, 97%, 98%, 99%, or 100% identical to the amino acid sequence of SEQ ID NO: 84. In some embodiments, the catalytic domain is derived from a deubiquitinase that consists of an amino acid sequence at least 80%, 81%, 82%, 83%, 84%, 85%, 86%, 87%, 88%, 89%, 90%, 91%, 92%, 93%, 94%, 95%, 96%, 97%, 98%, 99%, or 100% identical to the amino acid sequence of SEQ ID NO: 85. In some embodiments, the catalytic domain is derived from a deubiquitinase that consists of an amino acid sequence at least 80%, 81%, 82%, 83%, 84%, 85%, 86%, 87%, 88%, 89%, 90%, 91%, 92%, 93%, 94%, 95%, 96%, 97%, 98%, 99%, or 100% identical to the amino acid sequence of SEQ ID NO: 86. In some embodiments, the catalytic domain is derived from a deubiquitinase that consists of an amino acid sequence at least 80%, 81%, 82%, 83%, 84%, 85%, 86%, 87%, 88%, 89%, 90%, 91%, 92%, 93%, 94%, 95%, 96%, 97%, 98%, 99%, or 100% identical to the amino acid sequence of SEQ ID NO: 87. In some embodiments, the catalytic domain is derived from a deubiquitinase that consists of an amino acid sequence at least 80%, 81%, 82%, 83%, 84%, 85%, 86%, 87%, 88%, 89%, 90%, 91%, 92%, 93%, 94%, 95%, 96%, 97%, 98%, 99%, or 100% identical to the amino acid sequence of SEQ ID NO: 88. In some embodiments, the catalytic domain is derived from a deubiquitinase that consists of an amino acid sequence at least 80%, 81%, 82%, 83%, 84%, 85%, 86%, 87%, 88%, 89%, 90%, 91%, 92%, 93%, 94%, 95%, 96%, 97%, 98%, 99%, or 100% identical to the amino acid sequence of SEQ ID NO: 89. In some embodiments, the catalytic domain is derived from a deubiquitinase that consists of an amino acid sequence at least 80%, 81%, 82%, 83%, 84%, 85%, 86%, 87%, 88%, 89%, 90%, 91%, 92%, 93%, 94%, 95%, 96%, 97%, 98%, 99%, or 100% identical to the amino acid sequence of SEQ ID NO: 90. In some embodiments, the catalytic domain is derived from a deubiquitinase that consists of an amino acid sequence at least 80%, 81%, 82%, 83%, 84%, 85%, 86%, 87%, 88%, 89%, 90%, 91%, 92%, 93%, 94%, 95%, 96%, 97%, 98%, 99%, or 100% identical to the amino acid sequence of SEQ ID NO: 91. In some embodiments, the catalytic domain is derived from a deubiquitinase that consists of an amino acid sequence at least 80%, 81%, 82%, 83%, 84%, 85%, 86%, 87%, 88%, 89%, 90%, 91%, 92%, 93%, 94%, 95%, 96%, 97%, 98%, 99%, or 100% identical to the amino acid sequence of SEQ ID NO: 92. In some embodiments, the catalytic domain is derived from a deubiquitinase that consists of an amino acid sequence at least 80%, 81%, 82%, 83%, 84%, 85%, 86%, 87%, 88%, 89%, 90%, 91%, 92%, 93%, 94%, 95%, 96%, 97%, 98%, 99%, or 100% identical to the amino acid sequence of SEQ ID NO: 93. In some embodiments, the catalytic domain is derived from a deubiquitinase that consists of an amino acid sequence at least 80%, 81%, 82%, 83%, 84%, 85%, 86%, 87%, 88%, 89%, 90%, 91%, 92%, 93%, 94%, 95%, 96%, 97%, 98%, 99%, or 100% identical to the amino acid sequence of SEQ ID NO: 94. In some embodiments, the catalytic domain is derived from a deubiquitinase that consists of an amino acid sequence at least 80%, 81%, 82%, 83%, 84%, 85%, 86%, 87%, 88%, 89%, 90%, 91%, 92%, 93%, 94%, 95%, 96%, 97%, 98%, 99%, or 100% identical to the amino acid sequence of SEQ ID NO: 95. In some embodiments, the catalytic domain is derived from a deubiquitinase that consists of an amino acid sequence at least 80%, 81%, 82%, 83%, 84%, 85%, 86%, 87%, 88%, 89%, 90%, 91%, 92%, 93%, 94%, 95%, 96%, 97%, 98%, 99%, or 100% identical to the amino acid sequence of SEQ ID NO: 96. In some embodiments, the catalytic domain is derived from a deubiquitinase that consists of an amino acid sequence at least 80%, 81%, 82%, 83%, 84%, 85%, 86%, 87%, 88%, 89%, 90%, 91%, 92%, 93%, 94%, 95%, 96%, 97%, 98%, 99%, or 100% identical to the amino acid sequence of SEQ ID NO: 97. In some embodiments, the catalytic domain is derived from a deubiquitinase that consists of an amino acid sequence at least 80%, 81%, 82%, 83%, 84%, 85%, 86%, 87%, 88%, 89%, 90%, 91%, 92%, 93%, 94%, 95%, 96%, 97%, 98%, 99%, or 100% identical to the amino acid sequence of SEQ ID NO: 98. In some embodiments, the catalytic domain is derived from a deubiquitinase that consists of an amino acid sequence at least 80%, 81%, 82%, 83%, 84%, 85%, 86%, 87%, 88%, 89%, 90%, 91%, 92%, 93%, 94%, 95%, 96%, 97%, 98%, 99%, or 100% identical to the amino acid sequence of SEQ ID NO: 99. In some embodiments, the catalytic domain is derived from a deubiquitinase that consists of an amino acid sequence at least 80%, 81%, 82%, 83%, 84%, 85%, 86%, 87%, 88%, 89%, 90%, 91%, 92%, 93%, 94%, 95%, 96%, 97%, 98%, 99%, or 100% identical to the amino acid sequence of SEQ ID NO: 100. In some embodiments, the catalytic domain is derived from a deubiquitinase that consists of an amino acid sequence at least 80%, 81%, 82%, 83%, 84%, 85%, 86%, 87%, 88%, 89%, 90%, 91%, 92%, 93%, 94%, 95%, 96%, 97%, 98%, 99%, or 100% identical to the amino acid sequence of SEQ ID NO: 101. In some embodiments, the catalytic domain is derived from a deubiquitinase that consists of an amino acid sequence at least 80%, 81%, 82%, 83%, 84%, 85%, 86%, 87%, 88%, 89%, 90%, 91%, 92%, 93%, 94%, 95%, 96%, 97%, 98%, 99%, or 100% identical to the amino acid sequence of SEQ ID NO: 102. In some embodiments, the catalytic domain is derived from a deubiquitinase that consists of an amino acid sequence at least 80%, 81%, 82%, 83%, 84%, 85%, 86%, 87%, 88%, 89%, 90%, 91%, 92%, 93%, 94%, 95%, 96%, 97%, 98%, 99%, or 100% identical to the amino acid sequence of SEQ ID NO: 102. In some embodiments, the catalytic domain is derived from a deubiquitinase that consists of an amino acid sequence at least 80%, 81%, 82%, 83%, 84%, 85%, 86%, 87%, 88%, 89%, 90%, 91%, 92%, 93%, 94%, 95%, 96%, 97%, 98%, 99%, or 100% identical to the amino acid sequence of SEQ ID NO: 104. In some embodiments, the catalytic domain is derived from a deubiquitinase that consists of an amino acid sequence at least 80%, 81%, 82%, 83%, 84%, 85%, 86%, 87%, 88%, 89%, 90%, 91%, 92%, 93%, 94%, 95%, 96%, 97%, 98%, 99%, or 100% identical to the amino acid sequence of SEQ ID NO: 105. In some embodiments, the catalytic domain is derived from a deubiquitinase that consists of an amino acid sequence at least 80%, 81%, 82%, 83%, 84%, 85%, 86%, 87%, 88%, 89%, 90%, 91%, 92%, 93%, 94%, 95%, 96%, 97%, 98%, 99%, or 100% identical to the amino acid sequence of SEQ ID NO: 106. In some embodiments, the catalytic domain is derived from a deubiquitinase that consists of an amino acid sequence at least 80%, 81%, 82%, 83%, 84%, 85%, 86%, 87%, 88%, 89%, 90%, 91%, 92%, 93%, 94%, 95%, 96%, 97%, 98%, 99%, or 100% identical to the amino acid sequence of SEQ ID NO: 107. In some embodiments, the catalytic domain is derived from a deubiquitinase that consists of an amino acid sequence at least 80%, 81%, 82%, 83%, 84%, 85%, 86%, 87%, 88%, 89%, 90%, 91%, 92%, 93%, 94%, 95%, 96%, 97%, 98%, 99%, or 100% identical to the amino acid sequence of SEQ ID NO: 108. In some embodiments, the catalytic domain is derived from a deubiquitinase that consists of an amino acid sequence at least 80%, 81%, 82%, 83%, 84%, 85%, 86%, 87%, 88%, 89%, 90%, 91%, 92%, 93%, 94%, 95%, 96%, 97%, 98%, 99%, or 100% identical to the amino acid sequence of SEQ ID NO: 109. In some embodiments, the catalytic domain is derived from a deubiquitinase that consists of an amino acid sequence at least 80%, 81%, 82%, 83%, 84%, 85%, 86%, 87%, 88%, 89%, 90%, 91%, 92%, 93%, 94%, 95%, 96%, 97%, 98%, 99%, or 100% identical to the amino acid sequence of SEQ ID NO: 110. In some embodiments, the catalytic domain is derived from a deubiquitinase that consists of an amino acid sequence at least 80%, 81%, 82%, 83%, 84%, 85%, 86%, 87%, 88%, 89%, 90%, 91%, 92%, 93%, 94%, 95%, 96%, 97%, 98%, 99%, or 100% identical to the amino acid sequence of SEQ ID NO: 111. In some embodiments, the catalytic domain is derived from a deubiquitinase that consists of an amino acid sequence at least 80%, 81%, 82%, 83%, 84%, 85%, 86%, 87%, 88%, 89%, 90%, 91%, 92%, 93%, 94%, 95%, 96%, 97%, 98%, 99%, or 100% identical to the amino acid sequence of SEQ ID NO: 112.

[0211] In some embodiments, the catalytic domain comprises an amino acid sequence at least 80%, 81%, 82%, 83%, 84%, 85%, 86%, 87%, 88%, 89%, 90%, 91%, 92%, 93%, 94%, 95%, 96%, 97%, 98%, 99%, or 100% identical to the amino acid sequence of any one of SEQ ID NOS: 113-220 or 293. In some embodiments, the catalytic domain consists of an amino acid sequence at least 80%, 81%, 82%, 83%, 84%, 85%, 86%, 87%, 88%, 89%, 90%, 91%, 92%, 93%, 94%, 95%, 96%, 97%, 98%, 99%, or 100% identical to the amino acid sequence of any one of SEQ ID NOS: 113-220.

[0212] In some embodiments, the catalytic domain comprises an amino acid sequence at least 80%, 81%, 82%, 83%, 84%, 85%, 86%, 87%, 88%, 89%, 90%, 91%, 92%, 93%, 94%, 95%, 96%, 97%, 98%, 99%, or 100% identical to the amino acid sequence of SEQ ID NO: 113. In some embodiments, the catalytic domain comprises an amino acid sequence at least 80%, 81%, 82%, 83%, 84%, 85%, 86%, 87%, 88%, 89%, 90%, 91%, 92%, 93%, 94%, 95%, 96%, 97%, 98%, 99%, or 100% identical to the amino acid sequence of SEQ ID NO: 114. In some embodiments, the catalytic domain comprises an amino acid sequence at least 80%, 81%, 82%, 83%, 84%, 85%, 86%, 87%, 88%, 89%, 90%, 91%, 92%, 93%, 94%, 95%, 96%, 97%, 98%, 99%, or 100% identical to the amino acid sequence of SEQ ID NO: 115. In some embodiments, the catalytic domain comprises an amino acid sequence at least 80%, 81%, 82%, 83%, 84%, 85%, 86%, 87%, 88%, 89%, 90%, 91%, 92%, 93%, 94%, 95%, 96%, 97%, 98%, 99%, or 100% identical to the amino acid sequence of SEQ ID NO: 116. In some embodiments, the catalytic domain comprises an amino acid sequence at least 80%, 81%, 82%, 83%, 84%, 85%, 86%, 87%, 88%, 89%, 90%, 91%, 92%, 93%, 94%, 95%, 96%, 97%, 98%, 99%, or 100% identical to the amino acid sequence of SEQ ID NO: 117. In some embodiments, the catalytic domain comprises an amino acid sequence at least 80%, 81%, 82%, 83%, 84%, 85%, 86%, 87%, 88%, 89%, 90%, 91%, 92%, 93%, 94%, 95%, 96%, 97%, 98%, 99%, or 100% identical to the amino acid sequence of SEQ ID NO: 118. In some embodiments, the catalytic domain comprises an amino acid sequence at least 80%, 81%, 82%, 83%, 84%, 85%, 86%, 87%, 88%, 89%, 90%, 91%, 92%, 93%, 94%, 95%, 96%, 97%, 98%, 99%, or 100% identical to the amino acid sequence of SEQ ID NO: 119. In some embodiments, the catalytic domain comprises an amino acid sequence at least 80%, 81%, 82%, 83%, 84%, 85%, 86%, 87%, 88%, 89%, 90%, 91%, 92%, 93%, 94%, 95%, 96%, 97%, 98%, 99%, or 100% identical to the amino acid sequence of SEQ ID NO: 120. In some embodiments, the catalytic domain comprises an amino acid sequence at least 80%, 81%, 82%, 83%, 84%, 85%, 86%, 87%, 88%, 89%, 90%, 91%, 92%, 93%, 94%, 95%, 96%, 97%, 98%, 99%, or 100% identical to the amino acid sequence of SEQ ID NO: 121. In some embodiments, the catalytic domain comprises an amino acid sequence at least 80%, 81%, 82%, 83%, 84%, 85%, 86%, 87%, 88%, 89%, 90%, 91%, 92%, 93%, 94%, 95%, 96%, 97%, 98%, 99%, or 100% identical to the amino acid sequence of SEQ ID NO: 122. In some embodiments, the catalytic domain comprises an amino acid sequence at least 80%, 81%, 82%, 83%, 84%, 85%, 86%, 87%, 88%, 89%, 90%, 91%, 92%, 93%, 94%, 95%, 96%, 97%, 98%, 99%, or 100% identical to the amino acid sequence of SEQ ID NO: 123. In some embodiments, the catalytic domain comprises an amino acid sequence at least 80%, 81%, 82%, 83%, 84%, 85%, 86%, 87%, 88%, 89%, 90%, 91%, 92%, 93%, 94%, 95%, 96%, 97%, 98%, 99%, or 100% identical to the amino acid sequence of SEQ ID NO: 124. In some embodiments, the catalytic domain comprises an amino acid sequence at least 80%, 81%, 82%, 83%, 84%, 85%, 86%, 87%, 88%, 89%, 90%, 91%, 92%, 93%, 94%, 95%, 96%, 97%, 98%, 99%, or 100% identical to the amino acid sequence of SEQ ID NO: 125. In some embodiments, the catalytic domain comprises an amino acid sequence at least 80%, 81%, 82%, 83%, 84%, 85%, 86%, 87%, 88%, 89%, 90%, 91%, 92%, 93%, 94%, 95%, 96%, 97%, 98%, 99%, or 100% identical to the amino acid sequence of SEQ ID NO: 126. In some embodiments, the catalytic domain comprises an amino acid sequence at least 80%, 81%, 82%, 83%, 84%, 85%, 86%, 87%, 88%, 89%, 90%, 91%, 92%, 93%, 94%, 95%, 96%, 97%, 98%, 99%, or 100% identical to the amino acid sequence of SEQ ID NO: 127. In some embodiments, the catalytic domain comprises an amino acid sequence at least 80%, 81%, 82%, 83%, 84%, 85%, 86%, 87%, 88%, 89%, 90%, 91%, 92%, 93%, 94%, 95%, 96%, 97%, 98%, 99%, or 100% identical to the amino acid sequence of SEQ ID NO: 128. In some embodiments, the catalytic domain comprises an amino acid sequence at least 80%, 81%, 82%, 83%, 84%, 85%, 86%, 87%, 88%, 89%, 90%, 91%, 92%, 93%, 94%, 95%, 96%, 97%, 98%, 99%, or 100% identical to the amino acid sequence of SEQ ID NO: 129. In some embodiments, the catalytic domain comprises an amino acid sequence at least 80%, 81%, 82%, 83%, 84%, 85%, 86%, 87%, 88%, 89%, 90%, 91%, 92%, 93%, 94%, 95%, 96%, 97%, 98%, 99%, or 100% identical to the amino acid sequence of SEQ ID NO: 130. In some embodiments, the catalytic domain comprises an amino acid sequence at least 80%, 81%, 82%, 83%, 84%, 85%, 86%, 87%, 88%, 89%, 90%, 91%, 92%, 93%, 94%, 95%, 96%, 97%, 98%, 99%, or 100% identical to the amino acid sequence of SEQ ID NO: 131. In some embodiments, the catalytic domain comprises an amino acid sequence at least 80%, 81%, 82%, 83%, 84%, 85%, 86%, 87%, 88%, 89%, 90%, 91%, 92%, 93%, 94%, 95%, 96%, 97%, 98%, 99%, or 100% identical to the amino acid sequence of SEQ ID NO: 132. In some embodiments, the catalytic domain comprises an amino acid sequence at least 80%, 81%, 82%, 83%, 84%, 85%, 86%, 87%, 88%, 89%, 90%, 91%, 92%, 93%, 94%, 95%, 96%, 97%, 98%, 99%, or 100% identical to the amino acid sequence of SEQ ID NO: 133. In some embodiments, the catalytic domain comprises an amino acid sequence at least 80%, 81%, 82%, 83%, 84%, 85%, 86%, 87%, 88%, 89%, 90%, 91%, 92%, 93%, 94%, 95%, 96%, 97%, 98%, 99%, or 100% identical to the amino acid sequence of SEQ ID NO: 134. In some embodiments, the catalytic domain comprises an amino acid sequence at least 80%, 81%, 82%, 83%, 84%, 85%, 86%, 87%, 88%, 89%, 90%, 91%, 92%, 93%, 94%, 95%, 96%, 97%, 98%, 99%, or 100% identical to the amino acid sequence of SEQ ID NO: 135. In some embodiments, the catalytic domain comprises an amino acid sequence at least 80%, 81%, 82%, 83%, 84%, 85%, 86%, 87%, 88%, 89%, 90%, 91%, 92%, 93%, 94%, 95%, 96%, 97%, 98%, 99%, or 100% identical to the amino acid sequence of SEQ ID NO: 136. In some embodiments, the catalytic domain comprises an amino acid sequence at least 80%, 81%, 82%, 83%, 84%, 85%, 86%, 87%, 88%, 89%, 90%, 91%, 92%, 93%, 94%, 95%, 96%, 97%, 98%, 99%, or 100% identical to the amino acid sequence of SEQ ID NO: 137. In some embodiments, the catalytic domain comprises an amino acid sequence at least 80%, 81%, 82%, 83%, 84%, 85%, 86%, 87%, 88%, 89%, 90%, 91%, 92%, 93%, 94%, 95%, 96%, 97%, 98%, 99%, or 100% identical to the amino acid sequence of SEQ ID NO: 138. In some embodiments, the catalytic domain comprises an amino acid sequence at least 80%, 81%, 82%, 83%, 84%, 85%, 86%, 87%, 88%, 89%, 90%, 91%, 92%, 93%, 94%, 95%, 96%, 97%, 98%, 99%, or 100% identical to the amino acid sequence of SEQ ID NO: 139. In some embodiments, the catalytic domain comprises an amino acid sequence at least 80%, 81%, 82%, 83%, 84%, 85%, 86%, 87%, 88%, 89%, 90%, 91%, 92%, 93%, 94%, 95%, 96%, 97%, 98%, 99%, or 100% identical to the amino acid sequence of SEQ ID NO: 140. In some embodiments, the catalytic domain comprises an amino acid sequence at least 80%, 81%, 82%, 83%, 84%, 85%, 86%, 87%, 88%, 89%, 90%, 91%, 92%, 93%, 94%, 95%, 96%, 97%, 98%, 99%, or 100% identical to the amino acid sequence of SEQ ID NO: 141. In some embodiments, the catalytic domain comprises an amino acid sequence at least 80%, 81%, 82%, 83%, 84%, 85%, 86%, 87%, 88%, 89%, 90%, 91%, 92%, 93%, 94%, 95%, 96%, 97%, 98%, 99%, or 100% identical to the amino acid sequence of SEQ ID NO: 142. In some embodiments, the catalytic domain comprises an amino acid sequence at least 80%, 81%, 82%, 83%, 84%, 85%, 86%, 87%, 88%, 89%, 90%, 91%, 92%, 93%, 94%, 95%, 96%, 97%, 98%, 99%, or 100% identical to the amino acid sequence of SEQ ID NO: 143. In some embodiments, the catalytic domain comprises an amino acid sequence at least 80%, 81%, 82%, 83%, 84%, 85%, 86%, 87%, 88%, 89%, 90%, 91%, 92%, 93%, 94%, 95%, 96%, 97%, 98%, 99%, or 100% identical to the amino acid sequence of SEQ ID NO: 144. In some embodiments, the catalytic domain comprises an amino acid sequence at least 80%, 81%, 82%, 83%, 84%, 85%, 86%, 87%, 88%, 89%, 90%, 91%, 92%, 93%, 94%, 95%, 96%, 97%, 98%, 99%, or 100% identical to the amino acid sequence of SEQ ID NO: 145. In some embodiments, the catalytic domain comprises an amino acid sequence at least 80%, 81%, 82%, 83%, 84%, 85%, 86%, 87%, 88%, 89%, 90%, 91%, 92%, 93%, 94%, 95%, 96%, 97%, 98%, 99%, or 100% identical to the amino acid sequence of SEQ ID NO: 146. In some embodiments, the catalytic domain comprises an amino acid sequence at least 80%, 81%, 82%, 83%, 84%, 85%, 86%, 87%, 88%, 89%, 90%, 91%, 92%, 93%, 94%, 95%, 96%, 97%, 98%, 99%, or 100% identical to the amino acid sequence of SEQ ID NO: 147. In some embodiments, the catalytic domain comprises an amino acid sequence at least 80%, 81%, 82%, 83%, 84%, 85%, 86%, 87%, 88%, 89%, 90%, 91%, 92%, 93%, 94%, 95%, 96%, 97%, 98%, 99%, or 100% identical to the amino acid sequence of SEQ ID NO: 148. In some embodiments, the catalytic domain comprises an amino acid sequence at least 80%, 81%, 82%, 83%, 84%, 85%, 86%, 87%, 88%, 89%, 90%, 91%, 92%, 93%, 94%, 95%, 96%, 97%, 98%, 99%, or 100% identical to the amino acid sequence of SEQ ID NO: 149. In some embodiments, the catalytic domain comprises an amino acid sequence at least 80%, 81%, 82%, 83%, 84%, 85%, 86%, 87%, 88%, 89%, 90%, 91%, 92%, 93%, 94%, 95%, 96%, 97%, 98%, 99%, or 100% identical to the amino acid sequence of SEQ ID NO: 150. In some embodiments, the catalytic domain comprises an amino acid sequence at least 80%, 81%, 82%, 83%, 84%, 85%, 86%, 87%, 88%, 89%, 90%, 91%, 92%, 93%, 94%, 95%, 96%, 97%, 98%, 99%, or 100% identical to the amino acid sequence of SEQ ID NO: 151. In some embodiments, the catalytic domain comprises an amino acid sequence at least 80%, 81%, 82%, 83%, 84%, 85%, 86%, 87%, 88%, 89%, 90%, 91%, 92%, 93%, 94%, 95%, 96%, 97%, 98%, 99%, or 100% identical to the amino acid sequence of SEQ ID NO: 152. In some embodiments, the catalytic domain comprises an amino acid sequence at least 80%, 81%, 82%, 83%, 84%, 85%, 86%, 87%, 88%, 89%, 90%, 91%, 92%, 93%, 94%, 95%, 96%, 97%, 98%, 99%, or 100% identical to the amino acid sequence of SEQ ID NO: 153. In some embodiments, the catalytic domain comprises an amino acid sequence at least 80%, 81%, 82%, 83%, 84%, 85%, 86%, 87%, 88%, 89%, 90%, 91%, 92%, 93%, 94%, 95%, 96%, 97%, 98%, 99%, or 100% identical to the amino acid sequence of SEQ ID NO: 154. In some embodiments, the catalytic domain comprises an amino acid sequence at least 80%, 81%, 82%, 83%, 84%, 85%, 86%, 87%, 88%, 89%, 90%, 91%, 92%, 93%, 94%, 95%, 96%, 97%, 98%, 99%, or 100% identical to the amino acid sequence of SEQ ID NO: 155. In some embodiments, the catalytic domain comprises an amino acid sequence at least 80%, 81%, 82%, 83%, 84%, 85%, 86%, 87%, 88%, 89%, 90%, 91%, 92%, 93%, 94%, 95%, 96%, 97%, 98%, 99%, or 100% identical to the amino acid sequence of SEQ ID NO: 156. In some embodiments, the catalytic domain comprises an amino acid sequence at least 80%, 81%, 82%, 83%, 84%, 85%, 86%, 87%, 88%, 89%, 90%, 91%, 92%, 93%, 94%, 95%, 96%, 97%, 98%, 99%, or 100% identical to the amino acid sequence of SEQ ID NO: 157. In some embodiments, the catalytic domain comprises an amino acid sequence at least 80%, 81%, 82%, 83%, 84%, 85%, 86%, 87%, 88%, 89%, 90%, 91%, 92%, 93%, 94%, 95%, 96%, 97%, 98%, 99%, or 100% identical to the amino acid sequence of SEQ ID NO: 158. In some embodiments, the catalytic domain comprises an amino acid sequence at least 80%, 81%, 82%, 83%, 84%, 85%, 86%, 87%, 88%, 89%, 90%, 91%, 92%, 93%, 94%, 95%, 96%, 97%, 98%, 99%, or 100% identical to the amino acid sequence of SEQ ID NO: 159. In some embodiments, the catalytic domain comprises an amino acid sequence at least 80%, 81%, 82%, 83%, 84%, 85%, 86%, 87%, 88%, 89%, 90%, 91%, 92%, 93%, 94%, 95%, 96%, 97%, 98%, 99%, or 100% identical to the amino acid sequence of SEQ ID NO: 160. In some embodiments, the catalytic domain comprises an amino acid sequence at least 80%, 81%, 82%, 83%, 84%, 85%, 86%, 87%, 88%, 89%, 90%, 91%, 92%, 93%, 94%, 95%, 96%, 97%, 98%, 99%, or 100% identical to the amino acid sequence of SEQ ID NO: 161. In some embodiments, the catalytic domain comprises an amino acid sequence at least 80%, 81%, 82%, 83%, 84%, 85%, 86%, 87%, 88%, 89%, 90%, 91%, 92%, 93%, 94%, 95%, 96%, 97%, 98%, 99%, or 100% identical to the amino acid sequence of SEQ ID NO: 162. In some embodiments, the catalytic domain comprises an amino acid sequence at least 80%, 81%, 82%, 83%, 84%, 85%, 86%, 87%, 88%, 89%, 90%, 91%, 92%, 93%, 94%, 95%, 96%, 97%, 98%, 99%, or 100% identical to the amino acid sequence of SEQ ID NO: 163. In some embodiments, the catalytic domain comprises an amino acid sequence at least 80%, 81%, 82%, 83%, 84%, 85%, 86%, 87%, 88%, 89%, 90%, 91%, 92%, 93%, 94%, 95%, 96%, 97%, 98%, 99%, or 100% identical to the amino acid sequence of SEQ ID NO: 164. In some embodiments, the catalytic domain comprises an amino acid sequence at least 80%, 81%, 82%, 83%, 84%, 85%, 86%, 87%, 88%, 89%, 90%, 91%, 92%, 93%, 94%, 95%, 96%, 97%, 98%, 99%, or 100% identical to the amino acid sequence of SEQ ID NO: 165. In some embodiments, the catalytic domain comprises an amino acid sequence at least 80%, 81%, 82%, 83%, 84%, 85%, 86%, 87%, 88%, 89%, 90%, 91%, 92%, 93%, 94%, 95%, 96%, 97%, 98%, 99%, or 100% identical to the amino acid sequence of SEQ ID NO: 166. In some embodiments, the catalytic domain comprises an amino acid sequence at least 80%, 81%, 82%, 83%, 84%, 85%, 86%, 87%, 88%, 89%, 90%, 91%, 92%, 93%, 94%, 95%, 96%, 97%, 98%, 99%, or 100% identical to the amino acid sequence of SEQ ID NO: 167. In some embodiments, the catalytic domain comprises an amino acid sequence at least 80%, 81%, 82%, 83%, 84%, 85%, 86%, 87%, 88%, 89%, 90%, 91%, 92%, 93%, 94%, 95%, 96%, 97%, 98%, 99%, or 100% identical to the amino acid sequence of SEQ ID NO: 168. In some embodiments, the catalytic domain comprises an amino acid sequence at least 80%, 81%, 82%, 83%, 84%, 85%, 86%, 87%, 88%, 89%, 90%, 91%, 92%, 93%, 94%, 95%, 96%, 97%, 98%, 99%, or 100% identical to the amino acid sequence of SEQ ID NO: 169. In some embodiments, the catalytic domain comprises an amino acid sequence at least 80%, 81%, 82%, 83%, 84%, 85%, 86%, 87%, 88%, 89%, 90%, 91%, 92%, 93%, 94%, 95%, 96%, 97%, 98%, 99%, or 100% identical to the amino acid sequence of SEQ ID NO: 170. In some embodiments, the catalytic domain comprises an amino acid sequence at least 80%, 81%, 82%, 83%, 84%, 85%, 86%, 87%, 88%, 89%, 90%, 91%, 92%, 93%, 94%, 95%, 96%, 97%, 98%, 99%, or 100% identical to the amino acid sequence of SEQ ID NO: 171. In some embodiments, the catalytic domain comprises an amino acid sequence at least 80%, 81%, 82%, 83%, 84%, 85%, 86%, 87%, 88%, 89%, 90%, 91%, 92%, 93%, 94%, 95%, 96%, 97%, 98%, 99%, or 100% identical to the amino acid sequence of SEQ ID NO: 172. In some embodiments, the catalytic domain comprises an amino acid sequence at least 80%, 81%, 82%, 83%, 84%, 85%, 86%, 87%, 88%, 89%, 90%, 91%, 92%, 93%, 94%, 95%, 96%, 97%, 98%, 99%, or 100% identical to the amino acid sequence of SEQ ID NO: 173. In some embodiments, the catalytic domain comprises an amino acid sequence at least 80%, 81%, 82%, 83%, 84%, 85%, 86%, 87%, 88%, 89%, 90%, 91%, 92%, 93%, 94%, 95%, 96%, 97%, 98%, 99%, or 100% identical to the amino acid sequence of SEQ ID NO: 174. In some embodiments, the catalytic domain comprises an amino acid sequence at least 80%, 81%, 82%, 83%, 84%, 85%, 86%, 87%, 88%, 89%, 90%, 91%, 92%, 93%, 94%, 95%, 96%, 97%, 98%, 99%, or 100% identical to the amino acid sequence of SEQ ID NO: 175. In some embodiments, the catalytic domain comprises an amino acid sequence at least 80%, 81%, 82%, 83%, 84%, 85%, 86%, 87%, 88%, 89%, 90%, 91%, 92%, 93%, 94%, 95%, 96%, 97%, 98%, 99%, or 100% identical to the amino acid sequence of SEQ ID NO: 176. In some embodiments, the catalytic domain comprises an amino acid sequence at least 80%, 81%, 82%, 83%, 84%, 85%, 86%, 87%, 88%, 89%, 90%, 91%, 92%, 93%, 94%, 95%, 96%, 97%, 98%, 99%, or 100% identical to the amino acid sequence of SEQ ID NO: 177. In some embodiments, the catalytic domain comprises an amino acid sequence at least 80%, 81%, 82%, 83%, 84%, 85%, 86%, 87%, 88%, 89%, 90%, 91%, 92%, 93%, 94%, 95%, 96%, 97%, 98%, 99%, or 100% identical to the amino acid sequence of SEQ ID NO: 178. In some embodiments, the catalytic domain comprises an amino acid sequence at least 80%, 81%, 82%, 83%, 84%, 85%, 86%, 87%, 88%, 89%, 90%, 91%, 92%, 93%, 94%, 95%, 96%, 97%, 98%, 99%, or 100% identical to the amino acid sequence of SEQ ID NO: 179. In some embodiments, the catalytic domain comprises an amino acid sequence at least 80%, 81%, 82%, 83%, 84%, 85%, 86%, 87%, 88%, 89%, 90%, 91%, 92%, 93%, 94%, 95%, 96%, 97%, 98%, 99%, or 100% identical to the amino acid sequence of SEQ ID NO: 180. In some embodiments, the catalytic domain comprises an amino acid sequence at least 80%, 81%, 82%, 83%, 84%, 85%, 86%, 87%, 88%, 89%, 90%, 91%, 92%, 93%, 94%, 95%, 96%, 97%, 98%, 99%, or 100% identical to the amino acid sequence of SEQ ID NO: 181. In some embodiments, the catalytic domain comprises an amino acid sequence at least 80%, 81%, 82%, 83%, 84%, 85%, 86%, 87%, 88%, 89%, 90%, 91%, 92%, 93%, 94%, 95%, 96%, 97%, 98%, 99%, or 100% identical to the amino acid sequence of SEQ ID NO: 182. In some embodiments, the catalytic domain comprises an amino acid sequence at least 80%, 81%, 82%, 83%, 84%, 85%, 86%, 87%, 88%, 89%, 90%, 91%, 92%, 93%, 94%, 95%, 96%, 97%, 98%, 99%, or 100% identical to the amino acid sequence of SEQ ID NO: 183. In some embodiments, the catalytic domain comprises an amino acid sequence at least 80%, 81%, 82%, 83%, 84%, 85%, 86%, 87%, 88%, 89%, 90%, 91%, 92%, 93%, 94%, 95%, 96%, 97%, 98%, 99%, or 100% identical to the amino acid sequence of SEQ ID NO: 184. In some embodiments, the catalytic domain comprises an amino acid sequence at least 80%, 81%, 82%, 83%, 84%, 85%, 86%, 87%, 88%, 89%, 90%, 91%, 92%, 93%, 94%, 95%, 96%, 97%, 98%, 99%, or 100% identical to the amino acid sequence of SEQ ID NO: 185. In some embodiments, the catalytic domain comprises an amino acid sequence at least 80%, 81%, 82%, 83%, 84%, 85%, 86%, 87%, 88%, 89%, 90%, 91%, 92%, 93%, 94%, 95%, 96%, 97%, 98%, 99%, or 100% identical to the amino acid sequence of SEQ ID NO: 186. In some embodiments, the catalytic domain comprises an amino acid sequence at least 80%, 81%, 82%, 83%, 84%, 85%, 86%, 87%, 88%, 89%, 90%, 91%, 92%, 93%, 94%, 95%, 96%, 97%, 98%, 99%, or 100% identical to the amino acid sequence of SEQ ID NO: 187. In some embodiments, the catalytic domain comprises an amino acid sequence at least 80%, 81%, 82%, 83%, 84%, 85%, 86%, 87%, 88%, 89%, 90%, 91%, 92%, 93%, 94%, 95%, 96%, 97%, 98%, 99%, or 100% identical to the amino acid sequence of SEQ ID NO: 188. In some embodiments, the catalytic domain comprises an amino acid sequence at least 80%, 81%, 82%, 83%, 84%, 85%, 86%, 87%, 88%, 89%, 90%, 91%, 92%, 93%, 94%, 95%, 96%, 97%, 98%, 99%, or 100% identical to the amino acid sequence of SEQ ID NO: 189. In some embodiments, the catalytic domain comprises an amino acid sequence at least 80%, 81%, 82%, 83%, 84%, 85%, 86%, 87%, 88%, 89%, 90%, 91%, 92%, 93%, 94%, 95%, 96%, 97%, 98%, 99%, or 100% identical to the amino acid sequence of SEQ ID NO: 190. In some embodiments, the catalytic domain comprises an amino acid sequence at least 80%, 81%, 82%, 83%, 84%, 85%, 86%, 87%, 88%, 89%, 90%, 91%, 92%, 93%, 94%, 95%, 96%, 97%, 98%, 99%, or 100% identical to the amino acid sequence of SEQ ID NO: 191. In some embodiments, the catalytic domain comprises an amino acid sequence at least 80%, 81%, 82%, 83%, 84%, 85%, 86%, 87%, 88%, 89%, 90%, 91%, 92%, 93%, 94%, 95%, 96%, 97%, 98%, 99%, or 100% identical to the amino acid sequence of SEQ ID NO: 192. In some embodiments, the catalytic domain comprises an amino acid sequence at least 80%, 81%, 82%, 83%, 84%, 85%, 86%, 87%, 88%, 89%, 90%, 91%, 92%, 93%, 94%, 95%, 96%, 97%, 98%, 99%, or 100% identical to the amino acid sequence of SEQ ID NO: 193. In some embodiments, the catalytic domain comprises an amino acid sequence at least 80%, 81%, 82%, 83%, 84%, 85%, 86%, 87%, 88%, 89%, 90%, 91%, 92%, 93%, 94%, 95%, 96%, 97%, 98%, 99%, or 100% identical to the amino acid sequence of SEQ ID NO: 194. In some embodiments, the catalytic domain comprises an amino acid sequence at least 80%, 81%, 82%, 83%, 84%, 85%, 86%, 87%, 88%, 89%, 90%, 91%, 92%, 93%, 94%, 95%, 96%, 97%, 98%, 99%, or 100% identical to the amino acid sequence of SEQ ID NO: 195. In some embodiments, the catalytic domain comprises an amino acid sequence at least 80%, 81%, 82%, 83%, 84%, 85%, 86%, 87%, 88%, 89%, 90%, 91%, 92%, 93%, 94%, 95%, 96%, 97%, 98%, 99%, or 100% identical to the amino acid sequence of SEQ ID NO: 196. In some embodiments, the catalytic domain comprises an amino acid sequence at least 80%, 81%, 82%, 83%, 84%, 85%, 86%, 87%, 88%, 89%, 90%, 91%, 92%, 93%, 94%, 95%, 96%, 97%, 98%, 99%, or 100% identical to the amino acid sequence of SEQ ID NO: 197. In some embodiments, the catalytic domain comprises an amino acid sequence at least 80%, 81%, 82%, 83%, 84%, 85%, 86%, 87%, 88%, 89%, 90%, 91%, 92%, 93%, 94%, 95%, 96%, 97%, 98%, 99%, or 100% identical to the amino acid sequence of SEQ ID NO: 198. In some embodiments, the catalytic domain comprises an amino acid sequence at least 80%, 81%, 82%, 83%, 84%, 85%, 86%, 87%, 88%, 89%, 90%, 91%, 92%, 93%, 94%, 95%, 96%, 97%, 98%, 99%, or 100% identical to the amino acid sequence of SEQ ID NO: 199. In some embodiments, the catalytic domain comprises an amino acid sequence at least 80%, 81%, 82%, 83%, 84%, 85%, 86%, 87%, 88%, 89%, 90%, 91%, 92%, 93%, 94%, 95%, 96%, 97%, 98%, 99%, or 100% identical to the amino acid sequence of SEQ ID NO: 200. In some embodiments, the catalytic domain comprises an amino acid sequence at least 80%, 81%, 82%, 83%, 84%, 85%, 86%, 87%, 88%, 89%, 90%, 91%, 92%, 93%, 94%, 95%, 96%, 97%, 98%, 99%, or 100% identical to the amino acid sequence of SEQ ID NO: 201. In some embodiments, the catalytic domain comprises an amino acid sequence at least 80%, 81%, 82%, 83%, 84%, 85%, 86%, 87%, 88%, 89%, 90%, 91%, 92%, 93%, 94%, 95%, 96%, 97%, 98%, 99%, or 100% identical to the amino acid sequence of SEQ ID NO: 202. In some embodiments, the catalytic domain comprises an amino acid sequence at least 80%, 81%, 82%, 83%, 84%, 85%, 86%, 87%, 88%, 89%, 90%, 91%, 92%, 93%, 94%, 95%, 96%, 97%, 98%, 99%, or 100% identical to the amino acid sequence of SEQ ID NO: 203. In some embodiments, the catalytic domain comprises an amino acid sequence at least 80%, 81%, 82%, 83%, 84%, 85%, 86%, 87%, 88%, 89%, 90%, 91%, 92%, 93%, 94%, 95%, 96%, 97%, 98%, 99%, or 100% identical to the amino acid sequence of SEQ ID NO: 204. In some embodiments, the catalytic domain comprises an amino acid sequence at least 80%, 81%, 82%, 83%, 84%, 85%, 86%, 87%, 88%, 89%, 90%, 91%, 92%, 93%, 94%, 95%, 96%, 97%, 98%, 99%, or 100% identical to the amino acid sequence of SEQ ID NO: 205. In some embodiments, the catalytic domain comprises an amino acid sequence at least 80%, 81%, 82%, 83%, 84%, 85%, 86%, 87%, 88%, 89%, 90%, 91%, 92%, 93%, 94%, 95%, 96%, 97%, 98%, 99%, or 100% identical to the amino acid sequence of SEQ ID NO: 206. In some embodiments, the catalytic domain comprises an amino acid sequence at least 80%, 81%, 82%, 83%, 84%, 85%, 86%, 87%, 88%, 89%, 90%, 91%, 92%, 93%, 94%, 95%, 96%, 97%, 98%, 99%, or 100% identical to the amino acid sequence of SEQ ID NO: 207. In some embodiments, the catalytic domain comprises an amino acid sequence at least 80%, 81%, 82%, 83%, 84%, 85%, 86%, 87%, 88%, 89%, 90%, 91%, 92%, 93%, 94%, 95%, 96%, 97%, 98%, 99%, or 100% identical to the amino acid sequence of SEQ ID NO: 208. In some embodiments, the catalytic domain comprises an amino acid sequence at least 80%, 81%, 82%, 83%, 84%, 85%, 86%, 87%, 88%, 89%, 90%, 91%, 92%, 93%, 94%, 95%, 96%, 97%, 98%, 99%, or 100% identical to the amino acid sequence of SEQ ID NO: 209. In some embodiments, the catalytic domain comprises an amino acid sequence at least 80%, 81%, 82%, 83%, 84%, 85%, 86%, 87%, 88%, 89%, 90%, 91%, 92%, 93%, 94%, 95%, 96%, 97%, 98%, 99%, or 100% identical to the amino acid sequence of SEQ ID NO: 210. In some embodiments, the catalytic domain comprises an amino acid sequence at least 80%, 81%, 82%, 83%, 84%, 85%, 86%, 87%, 88%, 89%, 90%, 91%, 92%, 93%, 94%, 95%, 96%, 97%, 98%, 99%, or 100% identical to the amino acid sequence of SEQ ID NO: 211. In some embodiments, the catalytic domain comprises an amino acid sequence at least 80%, 81%, 82%, 83%, 84%, 85%, 86%, 87%, 88%, 89%, 90%, 91%, 92%, 93%, 94%, 95%, 96%, 97%, 98%, 99%, or 100% identical to the amino acid sequence of SEQ ID NO: 212. In some embodiments, the catalytic domain comprises an amino acid sequence at least 80%, 81%, 82%, 83%, 84%, 85%, 86%, 87%, 88%, 89%, 90%, 91%, 92%, 93%, 94%, 95%, 96%, 97%, 98%, 99%, or 100% identical to the amino acid sequence of SEQ ID NO: 213. In some embodiments, the catalytic domain comprises an amino acid sequence at least 80%, 81%, 82%, 83%, 84%, 85%, 86%, 87%, 88%, 89%, 90%, 91%, 92%, 93%, 94%, 95%, 96%, 97%, 98%, 99%, or 100% identical to the amino acid sequence of SEQ ID NO: 214. In some embodiments, the catalytic domain comprises an amino acid sequence at least 80%, 81%, 82%, 83%, 84%, 85%, 86%, 87%, 88%, 89%, 90%, 91%, 92%, 93%, 94%, 95%, 96%, 97%, 98%, 99%, or 100% identical to the amino acid sequence of SEQ ID NO: 215. In some embodiments, the catalytic domain comprises an amino acid sequence at least 80%, 81%, 82%, 83%, 84%, 85%, 86%, 87%, 88%, 89%, 90%, 91%, 92%, 93%, 94%, 95%, 96%, 97%, 98%, 99%, or 100% identical to the amino acid sequence of SEQ ID NO: 216. In some embodiments, the catalytic domain comprises an amino acid sequence at least 80%, 81%, 82%, 83%, 84%, 85%, 86%, 87%, 88%, 89%, 90%, 91%, 92%, 93%, 94%, 95%, 96%, 97%, 98%, 99%, or 100% identical to the amino acid sequence of SEQ ID NO: 217. In some embodiments, the catalytic domain comprises an amino acid sequence at least 80%, 81%, 82%, 83%, 84%, 85%, 86%, 87%, 88%, 89%, 90%, 91%, 92%, 93%, 94%, 95%, 96%, 97%, 98%, 99%, or 100% identical to the amino acid sequence of SEQ ID NO: 218. In some embodiments, the catalytic domain comprises an amino acid sequence at least 80%, 81%, 82%, 83%, 84%, 85%, 86%, 87%, 88%, 89%, 90%, 91%, 92%, 93%, 94%, 95%, 96%, 97%, 98%, 99%, or 100% identical to the amino acid sequence of SEQ ID NO: 219. In some embodiments, the catalytic domain comprises an amino acid sequence at least 80%, 81%, 82%, 83%, 84%, 85%, 86%, 87%, 88%, 89%, 90%, 91%, 92%, 93%, 94%, 95%, 96%, 97%, 98%, 99%, or 100% identical to the amino acid sequence of SEQ ID NO: 220. In some embodiments, the catalytic domain comprises an amino acid sequence at least 80%, 81%, 82%, 83%, 84%, 85%, 86%, 87%, 88%, 89%, 90%, 91%, 92%, 93%, 94%, 95%, 96%, 97%, 98%, 99%, or 100% identical to the amino acid sequence of SEQ ID NO: 293.

[0213] Table 1 below describes, the amino acid sequence of exemplary human deubiquitinases and exemplary catalytic domains of the exemplary human deubiquitinases. The catalytic domains are exemplary. A person of ordinary skill in the art could readily determine a sufficient amino acid sequence of a human deubiquitinase to mediate deubiquitination (e.g., a catalytic domain). Any of the human deubiquitinases (functional fragment or variants thereof) may be used to derive a catalytic domain for use in a fusion protein described herein.

TABLE 1
The amino acid sequence of exemplary human deubiquitinases
and exemplary catalytic domains of the same

| | SEQ | | SEQ | Exemplary Catalytic Domains |
|---|---|---|---|---|
| Description | ID NO | Amino Acid Sequence | ID NO | (Amino Acid Sequence) |
| UBP27_HUMAN | 1 | MCKDYVYDKDIEQIAKEEQGEA | 113 | SSFTIGLRGLINLGNTCEMN |
| Ubiquitin | | LKLQASTSTEVSHQQCSVPGLG | | CIVQALTHTPILRDFFLSDR |
| carboxyl- | | EKFPTWETTKPELELLGHNPRR | | HRCEMPSPELCLVCEMSSLE |
| terminal | | RRITSSFTIGLRGLINLGNTCF | | RELYSGNPSPHVPYKLLHLV |
| hydrolase 27 | | MNCIVQALTHTPILRDFFLSDR | | WIHARHLAGYRQQDAHEFLI |
| | | HRCEMPSPELCLVCEMSSLFRE | | AALDVLHRHCKGDDVGKAAN |
| | | LYSGNPSPHVPYKLLHLVWIHA | | NPNHCNCIIDQIFTGGLQSD |
| | | RHLAGYRQQDAHEFLIAALDVL | | VTCQACHGVSTTIDPCWDIS |
| | | HRHCKGDDVGKAANNPNHCNCI | | LDLPGSCTSFWPMSPGRESS |
| | | IDQIFTGGLQSDVTCQACHGVS | | VNGESHIPGITTLTDCLRRE |
| | | TTIDPCWDISLDLPGSCTSFWP | | TRPEHLGSSAKIKCGSCQSY |
| | | MSPGRESSVNGESHIPGITTLT | | QESTKQLTMNKLPVVACFHF |
| | | DCLRRFTRPEHLGSSAKIKCGS | | KRFEHSAKQRRKITTYISEP |
| | | CQSYQESTKQLTMNKLPVVACF | | LELDMTPFMASSKESRMNGQ |
| | | HFKRFEHSAKQRRKITTYISEP | | LQLPTNSGNNENKYSLFAVV |
| | | LELDMTPEMASSKESRMNGQLQ | | NHQGTLESGHYTSFIRHHKD |
| | | LPTNSGNNENKYSLFAVVNHQG | | QWFKCDDAVITKASIKDVLD |
| | | TLESGHYTSFIRHHKDQWEKCD | | SEGYLLFYHKQVLEHESEKV |
| | | DAVITKASIKDVLDSEGYLLFY | | KEMNTQAY |
| | | HKQVLEHESEKVKEMNTQAY | | |
| UBP48_HUMAN | 2 | MAPRLQLEKAAWRWAETVRPEE | 114 | NSFHNIDDPNCERRKKNSFV |
| Ubiquitin | | VSQEHIETAYRIWLEPCIRGVC | | GLTNLGATCYVNTFLQVWEL |
| carboxyl- | | RRNCKGNPNCLVGIGEHIWLGE | | NLELRQALYLCPSTCSDYML |
| terminal | | IDENSFHNIDDPNCERRKKNSF | | GDGIQEEKDYEPQTICEHLQ |
| hydrolase 48 | | VGLTNLGATCYVNTFLQVWFLN | | YLFALLQNSNRRYIDPSGFV |
| | | LELRQALYLCPSTCSDYMLGDG | | KALGLDTGQQQDAQEFSKLE |
| | | IQEEKDYEPQTICEHLQYLFAL | | MSLLEDTLSKQKNPDVRNIV |
| | | LQNSNRRYIDPSGFVKALGLDT | | QQQFCGEYAYVTVCNQCGRE |
| | | GQQQDAQEFSKLFMSLLEDTLS | | SKLLSKFYELELNIQGHKQL |
| | | KQKNPDVRNIVQQQFCGEYAYV | | TDCISEFLKEEKLEGDNRYF |
| | | TVCNQCGRESKLLSKFYELELN | | CENCQSKQNATRKIRLLSLP |
| | | IQGHKQLTDCISEFLKEEKLEG | | CTLNLQLMRFVEDRQTGHKK |
| | | DNRYFCENCQSKQNATRKIRLL | | KLNTYIGFSEILDMEPYVEH |
| | | SLPCTLNLQLMRFVEDRQTGHK | | KGGSYVYELSAVLIHRGVSA |
| | | KKLNTYIGFSEILDMEPYVEHK | | YSGHYIAHVKDPQSGEWYKE |
| | | GGSYVYELSAVLIHRGVSAYSG | | NDEDIEKMEGKKLQLGIEED |
| | | HYIAHVKDPQSGEWYKENDEDI | | LAEPSKSQTRKPKCGKGTHC |
| | | EKMEGKKLQLGIEEDLAEPSKS | | SRNAYMLVYRLQT |
| | | QTRKPKCGKGTHCSRNAYMLVY | | |
| | | RLQTQEKPNTTVQVPAFLQELV | | |
| | | DRDNSKFEEWCIEMAEMRKQSV | | |
| | | DKGKAKHEEVKELYQRLPAGAE | | |
| | | PYEFVSLEWLQKWLDESTPTKP | | |
| | | IDNHACLCSHDKLHPDKISIMK | | |
| | | RISEYAADIFYSRYGGGPRLTV | | |
| | | KALCKECVVERCRILRLKNQLN | | |
| | | EDYKTVNNLLKAAVKGSDGFWV | | |
| | | GKSSLRSWRQLALEQLDEQDGD | | |
| | | AEQSNGKMNGSTLNKDESKEER | | |
| | | KEEEELNENEDILCPHGELCIS | | |
| | | ENERRLVSKEAWSKLQQYFPKA | | |
| | | PEFPSYKECCSQCKILEREGEE | | |
| | | NEALHKMIANEQKTSLPNLFQD | | |
| | | KNRPCLSNWPEDTDVLYIVSQF | | |
| | | FVEEWRKFVRKPTRCSPVSSVG | | |
| | | NSALLCPHGGLMFTFASMTKED | | |
| | | SKLIALIWPSEWQMIQKLFVVD | | |
| | | HVIKITRIEVGDVNPSETQYIS | | |
| | | EPKLCPECREGLLCQQQRDLRE | | |
| | | YTQATIYVHKVVDNKKVMKDSA | | |
| | | PELNVSSSETEEDKEEAKPDGE | | |
| | | KDPDFNQSNGGTKRQKISHQNY | | |
| | | IAYQKQVIRRSMRHRKVRGEKA | | |
| | | LLVSANQTLKELKIQIMHAFSV | | |
| | | APFDQNLSIDGKILSDDCATLG | | |
| | | TLGVIPESVILLKADEPIADYA | | |
| | | AMDDVMQVCMPEEGFKGTGLLG | | |
| | | H | | |
| UBP3_HUMAN | 3 | MECPHLSSSVCIAPDSAKEPNG | 115 | TAICATGLRNLGNTCEMNAI |
| Ubiquitin | | SPSSWCCSVCRSNKSPWVCLTC | | LQSLSNIEQFCCYFKELPAV |
| carboxyl- | | SSVHCGRYVNGHAKKHYEDAQV | | ELRNGKTAGRRTYHTRSQGD |
| terminal | | PLTNHKKSEKQDKVQHTVCMDC | | NNVSLVEEFRKTLCALWQGS |
| hydrolase 3 | | SSYSTYCYRCDDFVVNDTKLGL | | QTAFSPESLFYVVWKIMPNF |
| | | VQKVREHLQNLENSAFTADRHK | | RGYQQQDAHEFMRYLLDHLH |
| | | KRKLLENSTLNSKLLKVNGSTT | | LELQGGENGVSRSAILQENS |
| | | AICATGLRNLGNTCEMNAILQS | | TLSASNKCCINGASTVVTAI |
| | | LSNIEQFCCYFKELPAVELRNG | | FGGILQNEVNCLICGTESRK |
| | | KTAGRRTYHTRSQGDNNVSLVE | | FDPELDLSLDIPSQFRSKRS |
| | | EFRKTLCALWQGSQTAFSPESL | | KNQENGPVCSLRDCLRSFTD |
| | | FYVVWKIMPNERGYQQQDAHEF | | LEELDETELYMCHKCKKKQK |
| | | MRYLLDHLHLELQGGENGVSRS | | STKKFWIQKLPKVLCLHLKR |
| | | AILQENSTLSASNKCCINGAST | | FHWTAYLRNKVDTYVEFPLR |
| | | VVTAIFGGILQNEVNCLICGTE | | GLDMKCYLLEPENSGPESCL |
| | | SRKFDPFLDLSLDIPSQFRSKR | | YDLAAVVVHHGSGVGSGHYT |
| | | SKNQENGPVCSLRDCLRSFTDL | | AYATHEGRWFHENDSTVTLT |
| | | EELDETELYMCHKCKKKQKSTK | | DEETVVKAKAYILFYVEHQ |
| | | KFWIQKLPKVLCLHLKRFHWTA | | |
| | | YLRNKVDTYVEFPLRGLDMKCY | | |
| | | LLEPENSGPESCLYDLAAVVVH | | |
| | | HGSGVGSGHYTAYATHEGRWFH | | |
| | | FNDSTVTLTDEETVVKAKAYIL | | |
| | | FYVEHQAKAGSDKL | | |
| U17LB_HUMAN | 4 | QLAPREKLPLSSRRPAAVGAGL | 116 | AVGAGLQNMGNTCYVNASLQ |
| Ubiquitin | | QNMGNTCYVNASLQCLTYTPPL | | CLTYTPPLANYMLSREHSQT |
| carboxyl- | | ANYMLSREHSQTCHRHKGCMLC | | CHRHKGCMLCTMQAHITRAL |
| terminal | | TMQAHITRALHNPGHVIQPSQA | | HNPGHVIQPSQALAAGFHRG |
| hydrolase 17- | | LAAGFHRGKQEDAHEFLMFTVD | | KQEDAHEFLMFTVDAMKKAC |
| like protein 11 | | AMKKACLPGHKQVDHHSKDTTL | | LPGHKQVDHHSKDTTLIHQI |
| | | IHQIFGGYWRSQIKCLHCHGIS | | FGGYWRSQIKCLHCHGISDT |
| | | DTFDPYLDIALDIQAAQSVQQA | | FDPYLDIALDIQAAQSVQQA |
| | | LEQLVKPEELNGENAYHCGVCL | | LEQLVKPEELNGENAYHCGV |
| | | QRAPASKTLTLHTSAKVLILVL | | CLQRAPASKTLTLHTSAKVL |
| | | KRFSDVTGNKIAKNVQYPECLD | | ILVLKRFSDVTGNKIAKNVQ |
| | | MQPYMSQTNTGPLVYVLYAVLV | | YPECLDMQPYMSQTNTGPLV |
| | | HAGWSCHNGHYFSYVKAQEGQW | | YVLYAVLVHAGWSCHNGHYF |
| | | YKMDDAEVTASSITSVLSQQAY | | SYVKAQEGQWYKMDDAEVTA |
| | | VLFYIQKSEWERHSESVSRGRE | | SSITSVLSQQAYVLFYIQKS |
| | | PRALGAEDTDRRATQGELKRDH | | |
| | | PCLQAPELDEHLVERATQESTL | | |
| | | DHWKFLQEQNKTKPEENVRKVE | | |
| | | GTLPPDVLVIHQSKYKCGMKNH | | |
| | | HPEQQSSLLNLSSTTPTHQESM | | |
| | | NTGTLASLRGRARRSKGKNKHS | | |
| | | KRALLVCQ | | |
| UBP1_HUMAN | 5 | MPGVIPSESNGLSRGSPSKKNR | 117 | LPFVGLNNLGNTCYLNSILQ |
| Ubiquitin | | LSLKFFQKKETKRALDETDSQE | | VLYFCPGFKSGVKHLENIIS |
| carboxyl- | | NEEKASEYRASEIDQVVPAAQS | | RKKEALKDEANQKDKGNCKE |
| terminal | | SPINCEKRENLLPFVGLNNLGN | | DSLASYELICSLQSLIISVE |
| hydrolase 1 | | TCYLNSILQVLYFCPGFKSGVK | | QLQASFLLNPEKYTDELATQ |
| | | HLENIISRKKEALKDEANQKDK | | PRRLLNTLRELNPMYEGYLQ |
| | | GNCKEDSLASYELICSLQSLII | | HDAQEVLQCILGNIQETCQL |
| | | SVEQLQASFLLNPEKYTDELAT | | LKKEEVKNVAELPTKVEEIP |
| | | QPRRLLNTLRELNPMYEGYLQH | | HPKEEMNGINSIEMDSMRHS |
| | | DAQEVLQCILGNIQETCQLLKK | | EDFKEKLPKGNGKRKSDTEF |
| | | EEVKNVAELPTKVEEIPHPKEE | | GNMKKKVKLSKEHQSLEENQ |
| | | MNGINSIEMDSMRHSEDEKEKL | | RQTRSKRKATSDTLESPPKI |
| | | PKGNGKRKSDTEFGNMKKKVKL | | IPKYISENESPRPSQKKSRV |
| | | SKEHQSLEENQRQTRSKRKATS | | KINWLKSATKQPSILSKFCS |
| | | DTLESPPKIIPKYISENESPRP | | LGKITTNQGVKGQSKENECD |
| | | SQKKSRVKINWLKSATKQPSIL | | PEEDLGKCESDNTTNGCGLE |
| | | SKFCSLGKITTNQGVKGQSKEN | | SPGNTVTPVNVNEVKPINKG |
| | | ECDPEEDLGKCESDNTTNGCGL | | EEQIGFELVEKLFQGQLVLR |
| | | ESPGNTVTPVNVNEVKPINKGE | | TRCLECESLTERREDFQDIS |
| | | EQIGFELVEKLFQGQLVLRTRC | | VPVQEDELSKVEESSEISPE |
| | | LECESLTERREDFQDISVPVQE | | PKTEMKTLRWAISQFASVER |
| | | DELSKVEESSEISPEPKTEMKT | | IVGEDKYFCENCHHYTEAER |
| | | LRWAISQFASVERIVGEDKYFC | | SLLEDKMPEVITIHLKCFAA |
| | | ENCHHYTEAERSLLEDKMPEVI | | SGLEFDCYGGGLSKINTPLL |
| | | TIHLKCFAASGLEFDCYGGGLS | | TPLKLSLEEWSTKPTNDSYG |
| | | KINTPLLTPLKLSLEEWSTKPT | | LFAVVMHSGITISSGHYTAS |
| | | NDSYGLFAVVMHSGITISSGHY | | VKVTDLNSLELDKGNFVVDQ |
| | | TASVKVTDLNSLELDKGNFVVD | | MCEIGKPEPLNEEEARGVVE |
| | | QMCEIGKPEPLNEEEARGVVEN | | NYNDEEVSIRVGGNTQPSKV |
| | | YNDEEVSIRVGGNTQPSKVLNK | | LNKKNVEAIGLLGGQKSKAD |
| | | KNVEAIGLLGGQKSKADYELYN | | YELYNKASNPDKVASTAFAE |
| | | KASNPDKVASTAFAENRNSETS | | NRNSETSDTTGTHESDRNKE |
| | | DTTGTHESDRNKESSDQTGINI | | SSDQTGINISGFENKISYVV |
| | | SGFENKISYVVQSLKEYEGKWL | | QSLKEYEGKWLLFDDSEVKV |
| | | LEDDSEVKVTEEKDELNSLSPS | | TEEKDELNSLSPSTSPTSTP |
| | | TSPTSTPYLLFYKKL | | YLLFYKKL |
| UBP40_HUMAN | 6 | MFGDLFEEEYSTVSNNQYGKGK | 118 | FTNLSGIRNQGGTCYLNSLL |
| Ubiquitin | | KLKTKALEPPAPREFTNLSGIR | | QTLHFTPEFREALFSLGPEE |
| carboxyl- | | NQGGTCYLNSLLQTLHFTPEER | | LGLFEDKDKPDAKVRIIPLQ |
| terminal | | EALFSLGPEELGLFEDKDKPDA | | LQRLFAQLLLLDQEAASTAD |
| hydrolase 40 | | KVRIIPLQLQRLFAQLLLLDQE | | LTDSFGWTSNEEMRQHDVQE |
| | | AASTADLTDSFGWTSNEEMRQH | | LNRILFSALETSLVGTSGHD |
| | | DVQELNRILFSALETSLVGTSG | | LIYRLYHGTIVNQIVCKECK |
| | | HDLIYRLYHGTIVNQIVCKECK | | NVSERQEDFLDLTVAVKNVS |
| | | NVSERQEDFLDLTVAVKNVSGL | | GLEDALWNMYVEEEVEDCDN |
| | | EDALWNMYVEEEVEDCDNLYHC | | LYHCGTCDRLVKAAKSAKLR |
| | | GTCDRLVKAAKSAKLRKLPPEL | | KLPPELTVSLLRENFDFVKC |
| | | TVSLLRENFDFVKCERYKETSC | | ERYKETSCYTFPLRINLKPF |
| | | YTFPLRINLKPFCEQSELDDLE | | CEQSELDDLEYIYDLESVII |
| | | YIYDLFSVIIHKGGCYGGHYHV | | HKGG |
| | | YIKDVDHLGNWQFQEEKSKPDV | | CYGGHYHVYIKDVDHLGNWQ |
| | | NLKDLQSEEEIDHPLMILKAIL | | FQEEKSKPDVNLKDLQSEEE |
| | | LEENNLIPVDQLGQKLLKKIGI | | IDHPLMILKAILLEENNLIP |
| | | SWNKKYRKQHGPLRKFLQLHSQ | | VDQLGQKLLKKIGISWNKKY |
| | | IFLLSSDESTVRLLKNSSLQAE | | RKQHGPLRKFLQLHSQIFLL |
| | | SDFQRNDQQIFKMLPPESPGLN | | SSDESTVRLLKNSSLQAESD |
| | | NSISCPHWFDINDSKVQPIREK | | FQRNDQQIFKMLPPESPGLN |
| | | DIEQQFQGKESAYMLFYRKSQL | | NSISCPHWFDINDSKVQPIR |
| | | QRPPEARANPRYGVPCHLLNEM | | EKDIEQQFQGKESAYMLFYR |
| | | DAANIELQTKRAECDSANNTFE | | KSQLQRPPEARANPRYGVPC |
| | | LHLHLGPQYHFENGALHPVVSQ | | HLLNEMDAANIELQTKRAEC |
| | | TESVWDLTEDKRKTLGDLRQSI | | DSANNTFELHLHLGPQYHFF |
| | | FQLLEFWEGDMVLSVAKLVPAG | | NGALHPVVSQTESVWDLTED |
| | | LHIYQSLGGDELTLCETEIADG | | KRKTLGDLRQSIFQLLEFWE |
| | | EDIFVWNGVEVGGVHIQTGIDC | | GDMVLSVAKLVPAGLHIYQS |
| | | EPLLLNVLHLDTSSDGEKCCQV | | LGGDELTLCETEIADGEDIF |
| | | IESPHVFPANAEVGTVLTALAI | | VWNGVEVGGVHIQTGIDCEP |
| | | PAGVIFINSAGCPGGEGWTAIP | | LLLNVLHLDTSSDGEKCCQV |
| | | KEDMRKTFREQGLRNGSSILIQ | | IESPHVFPANAEVGTVLTAL |
| | | DSHDDNSLLTKEEKWVTSMNEI | | AIPAGVIFINSAGCPGGEGW |
| | | DWLHVKNLCQLESEEKQVKISA | | TAIPKEDMRKTFREQGLRNG |
| | | TVNTMVEDIRIKAIKELKLMKE | | SSILIQDSHDDNSLLTKEEK |
| | | LADNSCLRPIDRNGKLLCPVPD | | WVTSMNEIDWLHVKNLCQLE |
| | | SYTLKEAELKMGSSLGLCLGKA | | SEEKQVKISATVNTMVEDIR |
| | | PSSSQLFLFFAMGSDVQPGTEM | | IKAIKELKLMKELADNSCLR |
| | | EIVVEETISVRDCLKLMLKKSG | | PIDRNGKLLCPVPDSYTLKE |
| | | LQGDAWHLRKMDWCYEAGEPLC | | AELKMGSSLGLCLGKAPSSS |
| | | EEDATLKELLICSGDTLLLIEG | | QLFLFFAMGSDVQPGTEMEI |
| | | QLPPLGFLKVPIWWYQLQGPSG | | VVEETISVRDCLKLMLKKSG |
| | | HWESHQDQTNCTSSWGRVWRAT | | LQGDAWHLRKMDWCYEAGEP |
| | | SSQGASGNEPAQVSLLYLGDIE | | LCEEDATLKELLICSGDTLL |
| | | ISEDATLAELKSQAMTLPPFLE | | LIEGQLPPLGELKVPIWWYQ |
| | | FGVPSPAHLRAWTVERKRPGRL | | LQGPSGHWESHQDQTNCTSS |
| | | LRTDRQPLREYKLGRRIEICLE | | WGRVWRATSSQGASGNEPAQ |
| | | PLQKGENLGPQDVLLRTQVRIP | | VSLLYLGDIEISEDATLAEL |
| | | GERTYAPALDLVWNAAQGGTAG | | KSQAMTLPPFLEFGVPSPAH |
| | | SLRQRVADFYRLPVEKIEIAKY | | LRAWTVERKRPGRLLRTDRQ |
| | | FPEKFEWLPISSWNQQITKRKK | | PLREYKLGRRIEICLEPLQK |
| | | KKKQDYLQGAPYYLKDGDTIGV | | GENLGPQDVLLRTQVRIPGE |
| | | KNLLIDDDDDESTIRDDTGKEK | | RTYAPALDLVWNAAQGGTAG |
| | | QKQRALGRRKSQEALHEQSSYI | | SLRQRVADFYRLPVEKIEIA |
| | | LSSAETPARPRAPETSLSIHVG | | KYFPEKFEWLPISSWNQQIT |
| | | SFR | | KRKKKKKQDYLQGAPYYLKD |
| | | | | GDTIGVKNLLIDDDDDESTI |
| | | | | RDDTGKEKQKQRALGRRKSQ |
| UBP7_HUMAN | 7 | MNHQQQQQQQKAGEQQLSEPED | 119 | TGYVGLKNQGATCYMNSLLQ |
| Ubiquitin | | MEMEAGDTDDPPRITQNPVING | | TLFFTNQLRKAVYMMPTEGD |
| carboxyl- | | NVALSDGHNTAEEDMEDDTSWR | | DSSKSVPLALQRVFYELQHS |
| terminal | | SEATFQFTVERFSRLSESVLSP | | DKPVGTKKLTKSFGWETLDS |
| hydrolase 7 | | PCFVRNLPWKIMVMPRFYPDRP | | FMQHDVQELCRVLLDNVENK |
| | | HQKSVGFFLQCNAESDSTSWSC | | MKGTCVEGTIPKLFRGKMVS |
| | | HAQAVLKIINYRDDEKSFSRRI | | YIQCKEVDYRSDRREDYYDI |
| | | SHLFFHKENDWGESNEMAWSEV | | QLSIKGKKNIFESFVDYVAV |
| | | TDPEKGFIDDDKVTFEVFVQAD | | EQLDGDNKYDAGEHGLQEAE |
| | | APHGVAWDSKKHTGYVGLKNQG | | KGVKFLTLPPVLHLQLMREM |
| | | ATCYMNSLLQTLFFTNQLRKAV | | YDPQTDQNIKINDRFEFPEQ |
| | | YMMPTEGDDSSKSVPLALQRVE | | LPLDEFLQKTDPKDPANYIL |
| | | YELQHSDKPVGTKKLTKSFGWE | | HAVLVHSGDNHGGHYVVYLN |
| | | TLDSFMQHDVQELCRVLLDNVE | | PKGDGKWCKFDDDVVSRCTK |
| | | NKMKGTCVEGTIPKLERGKMVS | | EEAIEHNYGGHDDDLSVRHC |
| | | YIQCKEVDYRSDRREDYYDIQL | | TNAYMLVYIRE |
| | | SIKGKKNIFESFVDYVAVEQLD | | |
| | | GDNKYDAGEHGLQEAEKGVKFL | | |
| | | TLPPVLHLQLMREMYDPQTDQN | | |
| | | IKINDRFEFPEQLPLDEFLQKT | | |
| | | DPKDPANYILHAVLVHSGDNHG | | |
| | | GHYVVYLNPKGDGKWCKEDDDV | | |
| | | VSRCTKEEAIEHNYGGHDDDLS | | |
| | | VRHCTNAYMLVYIRESKLSEVL | | |
| | | QAVTDHDIPQQLVERLQEEKRI | | |
| | | EAQKRKERQEAHLYMQVQIVAE | | |
| | | DQFCGHQGNDMYDEEKVKYTVE | | |
| | | KVLKNSSLAEFVQSLSQTMGFP | | |
| | | QDQIRLWPMQARSNGTKRPAML | | |
| | | DNEADGNKTMIELSDNENPWTI | | |
| | | FLETVDPELAASGATLPKEDKD | | |
| | | HDVMLFLKMYDPKTRSLNYCGH | | |
| | | IYTPISCKIRDLLPVMCDRAGE | | |
| | | IQDTSLILYEEVKPNLTERIQD | | |
| | | YDVSLDKALDELMDGDIIVFQK | | |
| | | DDPENDNSELPTAKEYERDLYH | | |
| | | RVDVIFCDKTIPNDPGFVVTLS | | |
| | | NRMNYFQVAKTVAQRLNTDPML | | |
| | | LQFFKSQGYRDGPGNPLRHNYE | | |
| | | GTLRDLLQFFKPRQPKKLYYQQ | | |
| | | LKMKITDFENRRSEKCIWLNSQ | | |
| | | FREEEITLYPDKHGCVRDLLEE | | |
| | | CKKAVELGEKASGKLRLLEIVS | | |
| | | YKIIGVHQEDELLECLSPATSR | | |
| | | TFRIEEIPLDQVDIDKENEMLV | | |
| | | TVAHFHKEVEGTFGIPFLLRIH | | |
| | | QGEHFREVMKRIQSLLDIQEKE | | |
| | | FEKFKFAIVMMGRHQYINEDEY | | |
| | | EVNLKDFEPQPGNMSHPRPWLG | | |
| | | LDHENKAPKRSRYTYLEKAIKI | | |
| | | HN | | |
| U17L5_HUMAN | 8 | MEDDSLYLRGEWQFNHESKLTS | 120 | AVGAGLQNMGNTCYVNASLQ |
| Ubiquitin | | SRPDAAFAEIQRTSLPEKSPLS | | CLTYTPPLANYMLSREHSQT |
| carboxyl- | | CETRVDLCDDLAPVARQLAPRE | | CHRHKGCMLCTMQAHITRAL |
| terminal | | KLPLSSRRPAAVGAGLQNMGNT | | HNPGHVIQPSQALAAGFHRG |
| hydrolase 17- | | CYVNASLQCLTYTPPLANYMLS | | KQEDAHEFLMFTVDAMKKAC |
| like protein 5 | | REHSQTCHRHKGCMLCTMQAHI | | LPGHKQVDHHSKDTTLIHQI |
| | | TRALHNPGHVIQPSQALAAGFH | | FGGYWRSQIKCLHCHGISDT |
| | | RGKQEDAHEFLMFTVDAMKKAC | | FDPYLDIALDIQAAQSVQQA |
| | | LPGHKQVDHHSKDTTLIHQIFG | | LEQLAKPEELNGENAYHCGV |
| | | GYWRSQIKCLHCHGISDTEDPY | | CLQRAPASKTLTLHTSAKVL |
| | | LDIALDIQAAQSVQQALEQLAK | | ILVLKRFSDVTGNKIAKNVQ |
| | | PEELNGENAYHCGVCLQRAPAS | | YPECLDMQPYMSQPNTGPLV |
| | | KTLTLHTSAKVLILVLKRESDV | | YVLYAVLVHAGWSCHNGHYF |
| | | TGNKIAKNVQYPECLDMQPYMS | | SYVKAQEGQWYKMDDAEVTA |
| | | QPNTGPLVYVLYAVLVHAGWSC | | SSITSVLSQQAYVLFYIQKS |
| | | HNGHYFSYVKAQEGQWYKMDDA | | EWERHSESVSRGREPRALGA |
| | | EVTASSITSVLSQQAYVLFYIQ | | EDTDRRATQGELKRDHPCLQ |
| | | KSEWERHSESVSRGREPRALGA | | APEL |
| | | EDTDRRATQGELKRDHPCLQAP | | |
| | | ELDEHLVERATQESTLDHWKEL | | |
| | | QEQNKTKPEFNVRKVEGTLPPD | | |
| | | VLVIHQSKYKCGMKNHHPEQQS | | |
| | | SLLNLSSSTPTHQESMNTGTLA | | |
| | | SLRGRARRSKGKNKHSKRALLV | | |
| | | CQ | | |
| U17LL_HUMAN | 9 | MEEDSLYLGGEWQFNHESKLTS | 121 | AVGAGLQNMGNTCYVNASLQ |
| Ubiquitin | | SRPDAAFAEIQRTSLPEKSPLS | | CLTYTPPLANYMLSREHSQT |
| carboxyl- | | CETRVDLCDDLAPVARQLAPRE | | CHRHKGCMLCTMQAHITRAL |
| terminal | | KLPLSNRRPAAVGAGLQNMGNT | | HNPGHVIQPSQALAAGFHRG |
| hydrolase 17- | | CYVNASLQCLTYTPPLANYMLS | | KQEDAHEFLMFTVDAMKKAC |
| like protein 21 | | REHSQTCHRHKGCMLCTMQAHI | | LPGHKQVDHHSKDTTLIHQI |
| | | TRALHNPGHVIQPSQALAAGEH | | FGGYWRSQIKCLHCHGISDT |
| | | RGKQEDAHEFLMFTVDAMKKAC | | FDPYLDIALDIQAAQSVQQA |
| | | LPGHKQVDHHSKDTTLIHQIFG | | LEQLVKPEELNGENAYHCGV |
| | | GYWRSQIKCLHCHGISDTFDPY | | CLQRAPASKMLTLLTSAKVL |
| | | LDIALDIQAAQSVQQALEQLVK | | ILVLKRFSDVTGNKIAKNVQ |
| | | PEELNGENAYHCGVCLQRAPAS | | YPECLDMQPYMSQPNTGPLV |
| | | KMLTLLTSAKVLILVLKRESDV | | YVLYAVLVHAGWSCHNGHYF |
| | | TGNKIAKNVQYPECLDMQPYMS | | SYVKAQEGQWYKMDDAEVTA |
| | | QPNTGPLVYVLYAVLVHAGWSC | | SSITSVLSQQAYVLFYIQKS |
| | | HNGHYFSYVKAQEGQWYKMDDA | | EWERHSESVSRGREPRALGA |
| | | EVTASSITSVLSQQAYVLFYIQ | | EDTDRRATQGELKRDHPCLQ |
| | | KSEWERHSESVSRGREPRALGA | | APEL |
| | | EDTDRRATQGELKRDHPCLQAP | | |
| | | ELDEHLVERATQESTLDHWKEL | | |
| | | QEQNKTKPEFNVRKVEGTLPPD | | |
| | | VLVIHQSKYKCGMKNHHPEQQS | | |
| | | SLLNLSSSTPTHQESMNTGTLA | | |
| | | SLRGRARRSKGKNKHSKRALLV | | |
| | | CQ | | |
| U17LA_HUMAN | 10 | MEDDSLYLGGEWQFNHESKLTS | 122 | AVGAGLQNMGNTCYVNASLQ |
| Ubiquitin | | SRPDAAFAEIQRTSLPEKSPLS | | CLTYKPPLANYMLFREHSQT |
| carboxyl- | | CETRVDLCDDLAPVARQLAPRE | | CHRHKGCMLCTMQAHITRAL |
| terminal | | KPPLSSRRPAAVGAGLQNMGNT | | HIPGHVIQPSQALAAGFHRG |
| hydrolase 17- | | CYVNASLQCLTYKPPLANYMLF | | KQEDAHEFLMFTVDAMRKAC |
| like protein 10 | | REHSQTCHRHKGCMLCTMQAHI | | LPGHKQVDRHSKDTTLIHQI |
| | | TRALHIPGHVIQPSQALAAGFH | | FGGYWRSQIKCLHCHGISDT |
| | | RGKQEDAHEFLMFTVDAMRKAC | | FDPYLDIALDIQAAQSVQQA |
| | | LPGHKQVDRHSKDTTLIHQIFG | | LEQLVKPEELNGENAYHCGV |
| | | GYWRSQIKCLHCHGISDTFDPY | | CLQRAPASKTLTLHNSAKVL |
| | | LDIALDIQAAQSVQQALEQLVK | | ILVLKRFPDVTGNKIAKNVQ |
| | | PEELNGENAYHCGVCLQRAPAS | | YPECLDMQPYMSQQNTGPLV |
| | | KTLTLHNSAKVLILVLKRFPDV | | YVLYAVLVHAGWSCHNGHYS |
| | | TGNKIAKNVQYPECLDMQPYMS | | SYVKAQEGQWYKMDDAEVTA |
| | | QQNTGPLVYVLYAVLVHAGWSC | | SSITSVLSQQAYVLFYIQKS |
| | | HNGHYSSYVKAQEGQWYKMDDA | | EWERHSESVSRGREPRALGV |
| | | EVTASSITSVLSQQAYVLFYIQ | | EDTDRRATQGELKRDHPCLQ |
| | | KSEWERHSESVSRGREPRALGV | | APEL |
| | | EDTDRRATQGELKRDHPCLQAP | | |
| | | ELDEHLVERATQESTLDHWKEL | | |
| | | QEQNKTKPEFNVRRVEGTVPPD | | |
| | | VLVIHQSKYKCRMKNHHPEQQS | | |
| | | SLLNLSSTTPTDQESMNTGTLA | | |
| | | SLRGRTRRSKGKNKHSKRALLV | | |
| | | CQ | | |
| UBP41_HUMAN | 11 | MDGVLFRAHQCQYVHPCVHVYV | 123 | WGLVGLHNIGQTCCLNSLIQ |
| Putative | | TVGLMDPLCERKEKASKQEREN | | VFVMNVDFARILKRITVPRG |
| ubiquitin | | PLAHLAAWGLVGLHNIGQTCCL | | ADEQRRSVPFQMLLLLEKMQ |
| carboxyl- | | NSLIQVFVMNVDFARILKRITV | | DSRQKAVWPLELAYCLQKYN |
| terminal | | PRGADEQRRSVPFQMLLLLEKM | | VPLFVQHDAAQLYLKLWNLI |
| hydrolase 41 | | QDSRQKAVWPLELAYCLQKYNV | | KDQIADVHLVERLQALYMIR |
| | | PLFVQHDAAQLYLKLWNLIKDQ | | MKDSLICLDCAMESSRNSSM |
| | | IADVHLVERLQALYMIRMKDSL | | LTLRLSFFDVDSKPLKTLED |
| | | ICLDCAMESSRNSSMLTLRLSF | | ALHCFFQPRELSSKSKCFCE |
| | | FDVDSKPLKTLEDALHCFFQPR | | NCGKKTRGKQVLKLTHLPQT |
| | | ELSSKSKCFCENCGKKTRGKQV | | LTIHLMRESIRNSQTRKICH |
| | | LKLTHLPQTLTIHLMRESIRNS | | SLYFPQSLDFSQILPMKRES |
| | | QTRKICHSLYFPQSLDESQILP | | CDAEEQSGGQYELFAVIAHV |
| | | MKRESCDAEEQSGGQYELFAVI | | GMADSGHYCVYIRNAVDGKW |
| | | AHVGMADSGHYCVYIRNAVDGK | | FCFNDSNICLVSWEDIQCTY |
| | | WFCENDSNICLVSWEDIQCTYG | | GNPNYHW |
| | | NPNYHW | | |
| UBP38_HUMAN | 12 | MDKILEGLVSSSHPLPLKRVIV | 124 | SETGKTGLINLGNTCYMNSV |
| Ubiquitin | | RKVVESAEHWLDEAQCEAMEDL | | IQALFMATDERRQVLSLNLN |
| carboxyl- | | TTRLILEGQDPFQRQVGHQVLE | | GCNSLMKKLQHLFAFLAHTQ |
| terminal | | AYARYHRPEFESFENKTFVLGL | | REAYAPRIFFEASRPPWFTP |
| hydrolase 38 | | LHQGYHSLDRKDVAILDYIHNG | | RSQQDCSEYLRELLDRLHEE |
| | | LKLIMSCPSVLDLFSLLQVEVL | | EKILKVQASHKPSEILECSE |
| | | RMVCERPEPQLCARLSDLLTDF | | TSLQEVASKAAVLTETPRTS |
| | | VQCIPKGKLSITFCQQLVRTIG | | DGEKTLIEKMFGGKLRTHIR |
| | | HFQCVSTQERELREYVSQVTKV | | CLNCRSTSQKVEAFTDLSLA |
| | | SNLLQNIWKAEPATLLPSLQEV | | FCPSSSLENMSVQDPASSPS |
| | | FASISSTDASFEPSVALASLVQ | | IQDGGLMQASVPGPSEEPVV |
| | | HIPLQMITVLIRSLTTDPNVKD | | YNPTTAAFICDSLVNEKTIG |
| | | ASMTQALCRMIDWLSWPLAQHV | | SPPNEFYCSENTSVPNESNK |
| | | DTWVIALLKGLAAVQKFTILID | | ILVNKDVPQKPGGETTPSVT |
| | | VTLLKIELVENRLWFPLVRPGA | | DLLNYFLAPEILTGDNQYYC |
| | | LAVLSHMLLSFQHSPEAFHLIV | | ENCASLQNAEKTMQITEEPE |
| | | PHVVNLVHSFKNDGLPSSTAFL | | YLILTLLRFSYDQKYHVRRK |
| | | VQLTELIHCMMYHYSGFPDLYE | | ILDNVSLPLVLELPVKRITS |
| | | PILEAIKDEPKPSEEKIKLILN | | FSSLSESWSVDVDFTDLSEN |
| | | QSAWTSQSNSLASCLSRLSGKS | | LAKKLKPSGTDEASCTKLVP |
| | | ETGKTGLINLGNTCYMNSVIQA | | YLLSSVVVHSGISSESGHYY |
| | | LEMATDERRQVLSLNLNGCNSL | | SYARNITSTDSSYQMYHQSE |
| | | MKKLQHLFAFLAHTQREAYAPR | | ALALASSQSHLLGRDSPSAV |
| | | IFFEASRPPWFTPRSQQDCSEY | | FEQDLENKEMSKEWFLENDS |
| | | LRFLLDRLHEEEKILKVQASHK | | RVTFTSFQSVQKITSREPKD |
| | | PSEILECSETSLQEVASKAAVL | | TAYVLLYKKQH |
| | | TETPRTSDGEKTLIEKMEGGKL | | |
| | | RTHIRCLNCRSTSQKVEAFTDL | | |
| | | SLAFCPSSSLENMSVQDPASSP | | |
| | | SIQDGGLMQASVPGPSEEPVVY | | |
| | | NPTTAAFICDSLVNEKTIGSPP | | |
| | | NEFYCSENTSVPNESNKILVNK | | |
| | | DVPQKPGGETTPSVTDLLNYFL | | |
| | | APEILTGDNQYYCENCASLQNA | | |
| | | EKTMQITEEPEYLILTLLRFSY | | |
| | | DQKYHVRRKILDNVSLPLVLEL | | |
| | | PVKRITSFSSLSESWSVDVDFT | | |
| | | DLSENLAKKLKPSGTDEASCTK | | |
| | | LVPYLLSSVVVHSGISSESGHY | | |
| | | YSYARNITSTDSSYQMYHQSEA | | |
| | | LALASSQSHLLGRDSPSAVFEQ | | |
| | | DLENKEMSKEWFLENDSRVTFT | | |
| | | SFQSVQKITSRFPKDTAYVLLY | | |
| | | KKQHSTNGLSGNNPTSGLWING | | |
| | | DPPLQKELMDAITKDNKLYLQE | | |
| | | QELNARARALQAASASCSERPN | | |
| | | GFDDNDPPGSCGPTGGGGGGGF | | |
| | | NTVGRLVF | | |
| UBP43_HUMAN | 13 | MDLGPGDAAGGGPLAPRPRRRR | 125 | RPPGAQGLKNHGNTCEMNAV |
| Ubiquitin | | SLRRLFSRELLALGSRSRPGDS | | VQCLSNTDLLAEFLALGRYR |
| carboxyl- | | PPRPQPGHCDGDGEGGFACAPG | | AAPGRAEVTEQLAALVRALW |
| terminal | | PVPAAPGSPGEERPPGPQPQLQ | | TREYTPQLSAEFKNAVSKYG |
| hydrolase 43 | | LPAGDGARPPGAQGLKNHGNTC | | SQFQGNSQHDALEFLLWLLD |
| | | FMNAVVQCLSNTDLLAEFLALG | | RVHEDLEGSSRGPVSEKLPP |
| | | RYRAAPGRAEVTEQLAALVRAL | | EATKTSENCLSPSAQLPLGQ |
| | | WTREYTPQLSAEFKNAVSKYGS | | SFVQSHFQAQYRSSLTCPHC |
| | | QFQGNSQHDALEFLLWLLDRVH | | LKQSNTFDPFLCVSLPIPLR |
| | | EDLEGSSRGPVSEKLPPEATKT | | QTRFLSVTLVFPSKSQRFLR |
| | | SENCLSPSAQLPLGQSFVQSHE | | VGLAVPILSTVAALRKMVAE |
| | | QAQYRSSLTCPHCLKQSNTEDP | | EGGVPADEVILVELYPSGFQ |
| | | FLCVSLPIPLRQTRFLSVTLVE | | RSFFDEEDLNTIAEGDNVYA |
| | | PSKSQRFLRVGLAVPILSTVAA | | FQVPPSPSQGTLSAHPLGLS |
| | | LRKMVAEEGGVPADEVILVELY | | ASPRLAAREGQRFSLSLHSE |
| | | PSGFQRSFFDEEDLNTIAEGDN | | SKVLILFCNLVGSGQQASRF |
| | | VYAFQVPPSPSQGTLSAHPLGL | | GPPFLIREDRAVSWAQLQQS |
| | | SASPRLAAREGQRFSLSLHSES | | ILSKVRHLMKSEAPVQNLGS |
| | | KVLILFCNLVGSGQQASRFGPP | | LFSIRVVGLSVACSYLSPKD |
| | | FLIREDRAVSWAQLQQSILSKV | | SRPLCHWAVDRVLHLRRPGG |
| | | RHLMKSEAPVQNLGSLESIRVV | | PPHVKLAVEWDSSVKERLFG |
| | | GLSVACSYLSPKDSRPLCHWAV | | SLQEERAQDADSVWQQQQAH |
| | | DRVLHLRRPGGPPHVKLAVEWD | | QQHSCTLDECFQFYTKEEQL |
| | | SSVKERLFGSLQEERAQDADSV | | AQDDAWKCPHCQVLQQGMVK |
| | | WQQQQAHQQHSCTLDECFQFYT | | LSLWTLPDILIIHLKRFCQV |
| | | KEEQLAQDDAWKCPHCQVLQQG | | GERRNKLSTLVKFPLSGLNM |
| | | MVKLSLWTLPDILIIHLKRFCQ | | APHVAQRSTSPEAGLGPWPS |
| | | VGERRNKLSTLVKFPLSGLNMA | | WKQPDCLPTSYPLDFLYDLY |
| | | PHVAQRSTSPEAGLGPWPSWKQ | | AVCNHHGNLQGGHYTAYCRN |
| | | PDCLPTSYPLDFLYDLYAVCNH | | SLDGQWYSYDDSTVEPLRED |
| | | HGNLQGGHYTAYCRNSLDGQWY | | EVNTRGAYILFYQKRN |
| | | SYDDSTVEPLREDEVNTRGAYI | | |
| | | LFYQKRNSIPPWSASSSMRGST | | |
| | | SSSLSDHWLLRLGSHAGSTRGS | | |
| UBP2_HUMAN | | LLSWSSAPCPSLPQVPDSPIFT | | SAQGLAGLRNLGNTCEMNSI |
| Ubiquitin | | NSLCNQEKGGLEPRRLVRGVKG | | LQCLSNTRELRDYCLQRLYM |
| carboxyl- | | RSISMKAPTTSRAKQGPFKTMP | | RDLHHGSNAHTALVEEFAKL |
| | | LRWSFGSKEKPPGASVELVEYL | | IQTIWTSSPNDVVSPSEFKT |
| | | ESRRRPRSTSQSIVSLLTGTAG | | QIQRYAPRFVGYNQQDAQEF |
| | | EDEKSASPRSNVALPANSEDGG | | LRFLLDGLHNEVNRVTLRPK |
| | | RAIERGPAGVPCPSAQPNHCLA | | SNPENLDHLPDDEKGRQMWR |
| | | PGNSDGPNTARKLKENAGQDIK | | KYLEREDSRIGDLFVGQLKS |
| | | LPRKFDLPLTVMPSVEHEKPAR | | SLTCTDCGYCSTVEDPEWDL |
| | | PEGQKAMNWKESFQMGSKSSPP | | |
| | | SPYMGFSGNSKDSRRGTSELDR | | |
| | | PLQGTLTLLRSVERKKENRRNE | | |
| | | RAEVSPQVPPVSLVSGGLSPAM | | |
| | | DGQAPGSPPALRIPEGLARGLG | | |
| | | SRLERDVWSAPSSLRLPRKASR | | |
| | | APRGSALGMSQRTVPGEQASYG | | |
| | | TFQRVKYHTLSLGRKKTLPESS | | |
| | | F | | |
| | | MSQLSSTLKRYTESARYTDAHY | | |
| | | AKSGYGAYTPSSYGANLAASLL | | |
| | | EKEKLGFKPVPTSSFLTRPRTY | | |
| | | GPSSLLDYDRGRPLLRPDITGG | | |
| | | GKRAESQTRGTERPLGSGLSGG | | |
| terminal | 14 | SGFPYGVTNNCLSYLPINAYDQ | 126 | SLPIAKRGYPEVTLMDCMRL |
| hydrolase 2 | | GVTLTQKLDSQSDLARDESSLR | | FTKEDVLDGDEKPTCCRCRG |
| | | TSDSYRIDPRNLGRSPMLARTR | | RKRCIKKFSIQRFPKILVLH |
| | | KELCTLQGLYQTASCPEYLVDY | | LKRFSESRIRTSKLTTFVNF |
| | | LENYGRKGSASQVPSQAPPSRV | | PLRDLDLREFASENTNHAVY |
| | | PEIISPTYRPIGRYTLWETGKG | | NLYAVSNHSGTTMGGHYTAY |
| | | QAPGPSRSSSPGRDGMNSKSAQ | | CRSPGTGEWHTENDSSVTPM |
| | | GLAGLRNLGNTCEMNSILQCLS | | SSSQVRTSDAYLLFYELAS |
| | | NTRELRDYCLQRLYMRDLHHGS | | |
| | | NAHTALVEEFAKLIQTIWTSSP | | |
| | | NDVVSPSEFKTQIQRYAPRFVG | | |
| | | YNQQDAQEFLRFLLDGLHNEVN | | |
| | | RVTLRPKSNPENLDHLPDDEKG | | |
| | | RQMWRKYLEREDSRIGDLFVGQ | | |
| | | LKSSLTCTDCGYCSTVEDPEWD | | |
| | | LSLPIAKRGYPEVTLMDCMRLE | | |
| | | TKEDVLDGDEKPTCCRCRGRKR | | |
| | | CIKKFSIQRFPKILVLHLKRFS | | |
| | | ESRIRTSKLTTFVNFPLRDLDL | | |
| | | REFASENTNHAVYNLYAVSNHS | | |
| | | GTTMGGHYTAYCRSPGTGEWHT | | |
| | | FNDSSVTPMSSSQVRTSDAYLL | | |
| | | FYELASPPSRM | | |
| UBP45_HUMAN | 15 | MRVKDPTKALPEKAKRSKRPTV | 127 | LSVRGITNLGNTCFFNAVMQ |
| Ubiquitin | | PHDEDSSDDIAVGLTCQHVSHA | | NLAQTYTLTDLMNEIKESST |
| carboxyl- | | ISVNHVKRAIAENLWSVCSECL | | KLKIFPSSDSQLDPLVVELS |
| terminal | | KERRFYDGQLVLTSDIWLCLKC | | RPGPLTSALFLFLHSMKETE |
| hydrolase 45 | | GFQGCGKNSESQHSLKHFKSSR | | KGPLSPKVLFNQLCQKAPRF |
| | | TEPHCIIINLSTWIIWCYECDE | | KDFQQQDSQELLHYLLDAVR |
| | | KLSTHCNKKVLAQIVDELQKHA | | TEETKRIQASILKAFNNPTT |
| | | SKTQTSAFSRIMKLCEEKCETD | | KTADDETRKKVKAYGKEGVK |
| | | EIQKGGKCRNLSVRGITNLGNT | | MNFIDRIFIGELTSTVMCEE |
| | | CFFNAVMQNLAQTYTLTDLMNE | | CANISTVKDPFIDISLPIIE |
| | | IKESSTKLKIFPSSDSQLDPLV | | ERVSKPLLWGRMNKYRSLRE |
| | | VELSRPGPLTSALFLFLHSMKE | | TDHDRYSGNVTIENIHQPRA |
| | | TEKGPLSPKVLENQLCQKAPRE | | AKKHSSSKDKSQLIHDRKCI |
| | | KDFQQQDSQELLHYLLDAVRTE | | RKLSSGETVTYQKNENLEMN |
| | | ETKRIQASILKAFNNPTTKTAD | | GDSLMFASLMNSESRLNESP |
| | | DETRKKVKAYGKEGVKMNFIDR | | TDDSEKEASHSESNVDADSE |
| | | IFIGELTSTVMCEECANISTVK | | PSESESASKQTGLERSSSGS |
| | | DPFIDISLPIIEERVSKPLLWG | | GVQPDGPLYPLSAGKLLYTK |
| | | RMNKYRSLRETDHDRYSGNVTI | | ETDSGDKEMAEAISELRLSS |
| | | ENIHQPRAAKKHSSSKDKSQLI | | TVTGDQDFDRENQPLNISNN |
| | | HDRKCIRKLSSGETVTYQKNEN | | LCFLEGKHLRSYSPQNAFQT |
| | | LEMNGDSLMFASLMNSESRLNE | | LSQSYITTSKECSIQSCLYQ |
| | | SPTDDSEKEASHSESNVDADSE | | FTSMELLMGNNKLLCENCTK |
| | | PSESESASKQTGLERSSSGSGV | | NKQKYQEETSFAEKKVEGVY |
| | | QPDGPLYPLSAGKLLYTKETDS | | TNARKQLLISAVPAVLILHL |
| | | GDKEMAEAISELRLSSTVTGDQ | | KRFHQAGLSLRKVNRHVDFP |
| | | DEDRENQPLNISNNLCFLEGKH | | LMLDLAPFCSATCKNASVGD |
| | | LRSYSPQNAFQTLSQSYITTSK | | KVLYGLYGIVEHSGSMREGH |
| | | ECSIQSCLYQFTSMELLMGNNK | | YTAYVKVRTPSRKLSEHNTK |
| | | LLCENCTKNKQKYQEETSFAEK | | KKNVPGLKAADNESAGQWVH |
| | | KVEGVYTNARKQLLISAVPAVL | | VSDTYLQVVPESRALSAQAY |
| | | ILHLKRFHQAGLSLRKVNRHVD | | LLFYERVL |
| | | FPLMLDLAPFCSATCKNASVGD | | |
| | | KVLYGLYGIVEHSGSMREGHYT | | |
| | | AYVKVRTPSRKLSEHNTKKKNV | | |
| | | PGLKAADNESAGQWVHVSDTYL | | |
| | | QVVPESRALSAQAYLLFYERVL | | |
| UBP32_HUMAN | 16 | MGAKESRIGFLSYEEALRRVTD | 128 | TEKGATGLSNLGNTCEMNSS |
| Ubiquitin | | VELKRLKDAFKRTCGLSYYMGQ | | IQCVSNTQPLTQYFISGRHL |
| carboxyl- | | HCFIREVLGDGVPPKVAEVIYC | | YELNRTNPIGMKGHMAKCYG |
| terminal | | SFGGTSKGLHENNLIVGLVLLT | | DLVQELWSGTQKNVAPLKLR |
| hydrolase 32 | | RGKDEEKAKYIFSLFSSESGNY | | WTIAKYAPRENGFQQQDSQE |
| | | VIREEMERMLHVVDGKVPDTLR | | LLAFLLDGLHEDLNRVHEKP |
| | | KCFSEGEKVNYEKERNWLFLNK | | YVELKDSDGRPDWEVAAEAW |
| | | DAFTFSRWLLSGGVYVTLTDDS | | DNHLRRNRSIVVDLFHGQLR |
| | | DTPTFYQTLAGVTHLEESDIID | | SQVKCKTCGHISVREDPENE |
| | | LEKRYWLLKAQSRTGREDLETF | | LSLPLPMDSYMHLEITVIKL |
| | | GPLVSPPIRPSLSEGLFNAFDE | | DGTTPVRYGLRLNMDEKYTG |
| | | NRDNHIDFKEISCGLSACCRGP | | LKKQLSDLCGLNSEQILLAE |
| | | LAERQKFCFKVFDVDRDGVLSR | | VHGSNIKNFPQDNQKVRLSV |
| | | VELRDMVVALLEVWKDNRTDDI | | SGFLCAFEIPVPVSPISASS |
| | | PELHMDLSDIVEGILNAHDTTK | | PTQTDFSSSPSTNEMFTLTT |
| | | MGHLTLEDYQIWSVKNVLANEF | | NGDLPRPIFIPNGMPNTVVP |
| | | LNLLFQVCHIVLGLRPATPEEE | | CGTEKNFTNGMVNGHMPSLP |
| | | GQIIRGWLERESRYGLQAGHNW | | DSPFTGYIIAVHRKMMRTEL |
| | | FIISMQWWQQWKEYVKYDANPV | | YFLSSQKNRPSLFGMPLIVP |
| | | VIEPSSVLNGGKYSFGTAAHPM | | |
| | | EQVEDRIGSSLSYVNTTEEKES | | |
| | | DNISTASEASETAGSGFLYSAT | | |
| | | PGADVCFARQHNTSDNNNQCLL | | |
| | | GANGNILLHLNPQKPGAIDNQP | | |
| | | LVTQEPVKATSLTLEGGRLKRT | | |
| | | PQLIHGRDYEMVPEPVWRALYH | | |
| | | WYGANLALPRPVIKNSKTDIPE | | |
| | | LELFPRYLLFLRQQPATRTQQS | | |
| | | NIWVNMGNVPSPNAPLKRVLAY | | |
| | | TGCFSRMQTIKEIHEYLSQRLR | | |
| | | IKEEDMRLWLYNSENYLTLLDD | | |
| | | EDHKLEYLKIQDEQHLVIEVRN | | |
| | | KDMSWPEEMSFIANSSKIDRHK | | |
| | | VPTEKGATGLSNLGNTCFMNSS | | |
| | | IQCVSNTQPLTQYFISGRHLYE | | |
| | | LNRTNPIGMKGHMAKCYGDLVQ | | |
| | | ELWSGTQKNVAPLKLRWTIAKY | | |
| | | APRFNGFQQQDSQELLAFLLDG | | |
| | | LHEDLNRVHEKPYVELKDSDGR | | |
| | | PDWEVAAEAWDNHLRRNRSIVV | | |
| | | DLFHGQLRSQVKCKTCGHISVR | | |
| | | FDPFNFLSLPLPMDSYMHLEIT | | |
| | | VIKLDGTTPVRYGLRLNMDEKY | | |
| | | TGLKKQLSDLCGLNSEQILLAE | | |
| | | VHGSNIKNFPQDNQKVRLSVSG | | |
| | | FLCAFEIPVPVSPISASSPTQT | | |
| | | DFSSSPSTNEMFTLTTNGDLPR | | |
| | | PIFIPNGMPNTVVPCGTEKNFT | | |
| | | NGMVNGHMPSLPDSPFTGYIIA | | |
| | | VHRKMMRTELYFLSSQKNRPSL | | |
| | | FGMPLIVPCTVHTRKKDLYDAV | | |
| | | WIQVSRLASPLPPQEASNHAQD | | |
| | | CDDSMGYQYPFTLRVVQKDGNS | | |
| | | CAWCPWYRFCRGCKIDCGEDRA | | |
| | | FIGNAYIAVDWDPTALHLRYQT | | |
| | | SQERVVDEHESVEQSRRAQAEP | | |
| | | INLDSCLRAFTSEEELGENEMY | | |
| | | YCSKCKTHCLATKKLDLWRLPP | | |
| | | ILIIHLKRFQFVNGRWIKSQKI | | |
| | | VKFPRESFDPSAFLVPRDPALC | | |
| | | QHKPLTPQGDELSEPRILAREV | | |
| | | KKVDAQSSAGEEDVLLSKSPSS | | |
| | | LSANIISSPKGSPSSSRKSGTS | | |
| | | CPSSKNSSPNSSPRTLGRSKGR | | |
| | | LRLPQIGSKNKLSSSKENLDAS | | |
| | | KENGAGQICELADALSRGHVLG | | |
| | | GSQPELVTPQDHEVALANGFLY | | |
| | | EHEACGNGYSNGQLGNHSEEDS | | |
| | | TDDQREDTRIKPIYNLYAISCH | | |
| | | SGILGGGHYVTYAKNPNCKWYC | | |
| | | YNDSSCKELHPDEIDTDSAYIL | | |
| | | FYEQQGIDYAQFLPKTDGKKMA | | |
| | | DTSSMDEDFESDYKKYCVLQ | | |
| | | YNDSSCKELHPDEIDTDSAYIL | | |
| | | FYEQQGIDYAQFLPKTDGKKMA | | |
| | | DTSSMDEDFESDYKKYCVLQ | | |
| U17L6_HUMAN | 17 | MEDDSLYLRGEWQENHESKLTS | 129 | AVGAGLQNMGNTCYVNASLQ |
| Ubiquitin | | SRPDAAFAEIQRTSLPEKSPLS | | CLTYTPPLANYMLSREHSQT |
| carboxyl- | | CETRVDLCDDLAPVARQLAPRE | | CHRHKGCMLCTMQAHITRAL |
| terminal | | KLPLSSRRPAAVGAGLQNMGNT | | HNPGHVIQPSQALAAGFHRG |
| hydrolase 17- | | CYVNASLQCLTYTPPLANYMLS | | KQEDAHEFLMFTVDAMKKAC |
| like protein 6 | | REHSQTCHRHKGCMLCTMQAHI | | LPGHKQVDHHSKDTTLIHQI |
| | | TRALHNPGHVIQPSQALAAGFH | | FGGYWRSQIKCLHCHGISDT |
| | | RGKQEDAHEFLMFTVDAMKKAC | | FDPYLDIALDIQAAQSVQQA |
| | | LPGHKQVDHHSKDTTLIHQIFG | | LEQLVKPEELNGENAYHCGV |
| | | GYWRSQIKCLHCHGISDTEDPY | | CLQRAPASKTLTLHTSAKVL |
| | | LDIALDIQAAQSVQQALEQLVK | | ILVLKRFSDVTGNKIAKNVQ |
| | | PEELNGENAYHCGVCLQRAPAS | | YPECLDMQPYMSQQNTGPLV |
| | | KTLTLHTSAKVLILVLKRESDV | | YVLYAVLVHAGWSCHNGHYF |
| | | TGNKIAKNVQYPECLDMQPYMS | | SYVKAQEGQWYKMDDAEVTA |
| | | QQNTGPLVYVLYAVLVHAGWSC | | SSITSVLSQQAYVLFYIQKS |
| | | HNGHYFSYVKAQEGQWYKMDDA | | |
| | | EVTASSITSVLSQQAYVLFYIQ | | |
| | | KSEWERHSESVSRGREPRALGS | | |
| | | ED | | |
| UBP42_HUMAN | 18 | MTIVDKASESSDPSAYQNQPGS | 130 | RVGAGLQNLGNTCFANAALQ |
| Ubiquitin | | SEAVSPGDMDAGSASWGAVSSL | | CLTYTPPLANYMLSHEHSKT |
| carboxyl- | | NDVSNHTLSLGPVPGAVVYSSS | | CHAEGFCMMCTMQAHITQAL |
| terminal | | SVPDKSKPSPQKDQALGDGIAP | | SNPGDVIKPMFVINEMRRIA |
| hydrolase 42 | | PQKVLFPSEKICLKWQQTHRVG | | RHFREGNQEDAHEFLQYTVD |
| | | AGLQNLGNTCFANAALQCLTYT | | AMQKACLNGSNKLDRHTQAT |
| | | PPLANYMLSHEHSKTCHAEGFC | | TLVCQIFGGYLRSRVKCLNC |
| | | MMCTMQAHITQALSNPGDVIKP | | KGVSDTFDPYLDITLEIKAA |
| | | MFVINEMRRIARHEREGNQEDA | | QSVNKALEQFVKPEQLDGEN |
| | | HEFLQYTVDAMQKACLNGSNKL | | SYKCSKCKKMVPASKRFTIH |
| | | DRHTQATTLVCQIFGGYLRSRV | | RSSNVLTLSLKRFANFTGGK |
| | | KCLNCKGVSDTFDPYLDITLEI | | IAKDVKYPEYLDIRPYMSQP |
| | | KAAQSVNKALEQFVKPEQLDGE | | NGEPIVYVLYAVLVHTGENC |
| | | NSYKCSKCKKMVPASKRFTIHR | | HAGHYFCYIKASNGLWYQMN |
| | | SSNVLTLSLKRFANFTGGKIAK | | DSIVSTSDIRSVLSQQAYVL |
| | | DVKYPEYLDIRPYMSQPNGEPI | | FYIRSHDVKNGGE |
| | | VYVLYAVLVHTGENCHAGHYFC | | |
| | | YIKASNGLWYQMNDSIVSTSDI | | |
| | | RSVLSQQAYVLFYIRSHDVKNG | | |
| | | GELTHPTHSPGQSSPRPVISQR | | |
| | | VVTNKQAAPGFIGPQLPSHMIK | | |
| | | NPPHLNGTGPLKDTPSSSMSSP | | |
| | | NGNSSVNRASPVNASASVQNWS | | |
| | | VNRSSVIPEHPKKQKITISIHN | | |
| | | KLPVRQCQSQPNLHSNSLENPT | | |
| | | KPVPSSTITNSAVQSTSNASTM | | |
| | | SVSSKVTKPIPRSESCSQPVMN | | |
| | | GKSKLNSSVLVPYGAESSEDSD | | |
| | | EESKGLGKENGIGTIVSSHSPG | | |
| | | QDAEDEEATPHELQEPMTLNGA | | |
| | | NSADSDSDPKENGLAPDGASCQ | | |
| | | GQPALHSENPFAKANGLPGKLM | | |
| | | PAPLLSLPEDKILETERLSNKL | | |
| | | KGSTDEMSAPGAERGPPEDRDA | | |
| | | EPQPGSPAAESLEEPDAAAGLS | | |
| | | STKKAPPPRDPGTPATKEGAWE | | |
| | | AMAVAPEEPPPSAGEDIVGDTA | | |
| | | PPDLCDPGSLTGDASPLSQDAK | | |
| | | GMIAEGPRDSALAEAPEGLSPA | | |
| | | PPARSEEPCEQPLLVHPSGDHA | | |
| | | RDAQDPSQSLGAPEAAERPPAP | | |
| | | VLDMAPAGHPEGDAEPSPGERV | | |
| | | EDAAAPKAPGPSPAKEKIGSLR | | |
| | | KVDRGHYRSRRERSSSGEPARE | | |
| | | SRSKTEGHRHRRRRTCPRERDR | | |
| | | QDRHAPEHHPGHGDRLSPGERR | | |
| | | SLGRCSHHHSRHRSGVELDWVR | | |
| | | HHYTEGERGWGREKFYPDRPRW | | |
| | | DRCRYYHDRYALYAARDWKPFH | | |
| | | GGREHERAGLHERPHKDHNRGR | | |
| | | RGCEPARERERHRPSSPRAGAP | | |
| | | HALAPHPDRESHDRTALVAGDN | | |
| | | CNLSDRFHEHENGKSRKRRHDS | | |
| | | VENSDSHVEKKARRSEQKDPLE | | |
| | | EPKAKKHKKSKKKKKSKDKHRD | | |
| | | RDSRHQQDSDLSAACSDADLHR | | |
| | | HKKKKKKKKRHSRKSEDFVKDS | | |
| | | ELHLPRVTSLETVAQFRRAQGG | | |
| | | FPLSGGPPLEGVGPFREKTKHL | | |
| | | RMESRDDRCRLFEYGQGKRRYL | | |
| | | ELGR | | |
| U17L7_HUMAN | 19 | MEDDSLYLGGDWQFNHESKLTS | 131 | AVGAGLQKIGNTFYVNVSLQ |
| Inactive | | SRLDAAFAEIQRTSLSEKSPLS | | CLTYTLPLSNYMLSREDSQT |
| ubiquitin | | SETREDLCDDLAPVARQLAPRE | | CHLHKCCMFCTMQAHITWAL |
| carboxyl- | | KLPLSSRRPAAVGAGLQKIGNT | | HSPGHVIQPSQVLAAGFHRG |
| terminal | | FYVNVSLQCLTYTLPLSNYMLS | | EQEDAHEFLMFTVDAMKKAC |
| hydrolase 17- | | REDSQTCHLHKCCMFCTMQAHI | | LPGHKQLDHHSKDTTLIHQI |
| like protein 7 | | TWALHSPGHVIQPSQVLAAGFH | | FGAYWRSQIKYLHCHGVSDT |
| | | RGEQEDAHEFLMFTVDAMKKAC | | FDPYLDIALDIQAAQSVKQA |
| | | LPGHKQLDHHSKDTTLIHQIFG | | LEQLVKPKELNGENAYHCGL |
| | | AYWRSQIKYLHCHGVSDTEDPY | | CLQKAPASKTLTLPTSAKVL |
| | | LDIALDIQAAQSVKQALEQLVK | | ILVLKRFSDVTGNKLAKNVQ |
| | | PKELNGENAYHCGLCLQKAPAS | | YPKCRDMQPYMSQQNTGPLV |
| | | KTLTLPTSAKVLILVLKRESDV | | YVLYAVLVHAGWSCHNGHYF |
| | | TGNKLAKNVQYPKCRDMQPYMS | | SYVKAQEGQWYKMDDAEVTA |
| | | QQNTGPLVYVLYAVLVHAGWSC | | SGITSVLSQQAYVLFYIQKS |
| | | HNGHYFSYVKAQEGQWYKMDDA | | EWERHSESVSRGREPRALGA |
| | | EVTASGITSVLSQQAYVLFYIQ | | EDTDRPATQGELKRDHPCLQ |
| | | KSEWERHSESVSRGREPRALGA | | VPEL |
| | | EDTDRPATQGELKRDHPCLQVP | | |
| | | ELDEHLVERATQESTLDHWKFP | | |
| | | QEQNKTKPEFNVRKVEGTLPPN | | |
| | | VLVIHQSKYKCGMKNHHPEQQS | | |
| | | SLLNLSSTKPTDQESMNTGTLA | | |
| | | SLQGSTRRSKGNNKHSKRSLLV | | |
| | | CQ | | |
| U17LH_HUMAN | 20 | MEDDSLYLGGEWQFNHESKLTS | 132 | AVGAGLQNMGNTCYVNASLQ |
| Ubiquitin | | SRPDAAFAEIQRTSLPEKSPLS | | CLTYTPPLANYMLSREHSQT |
| carboxyl- | | CETRVDLCDDLAPVARQLAPRE | | CHRHKGCMLCTMQAHITRAL |
| terminal | | KLPLSSRRPAAVGAGLQNMGNT | | HNPGHVIQPSQALAAGFHRG |
| hydrolase 17- | | CYVNASLQCLTYTPPLANYMLS | | KQEDAHEFLMFTVDAMKKAC |
| like protein 17 | | REHSQTCHRHKGCMLCTMQAHI | | LPGHKQVDHHSKDTTLIHQI |
| | | TRALHNPGHVIQPSQALAAGFH | | FGGYWRSQIKCLHCHGISDT |
| | | RGKQEDAHEFLMFTVDAMKKAC | | FDPYLDIALDIQAAQSVQQA |
| | | LPGHKQVDHHSKDTTLIHQIFG | | LEQLVKPEELNGENAYHCGV |
| | | GYWRSQIKCLHCHGISDTFDPY | | CLQRAPASKTLTLHTSAKVL |
| | | LDIALDIQAAQSVQQALEQLVK | | ILVLKRFSDVTGNKIAKNVQ |
| | | PEELNGENAYHCGVCLQRAPAS | | YPECLDMQPYMSQQNTGPLV |
| | | KTLTLHTSAKVLILVLKRESDV | | YVLYAVLVHAGWSCHNGHYF |
| | | TGNKIAKNVQYPECLDMQPYMS | | SYVKAQEGQWYKMDDAEVTA |
| | | QQNTGPLVYVLYAVLVHAGWSC | | ASITSVLSQQAYVLFYIQKS |
| | | HNGHYFSYVKAQEGQWYKMDDA | | EWERHSESVSRGREPRALGA |
| | | EVTAASITSVLSQQAYVLFYIQ | | EDTDRRATQGELKRDHPCLQ |
| | | KSEWERHSESVSRGREPRALGA | | APEL |
| | | EDTDRRATQGELKRDHPCLQAP | | |
| | | ELDEHLVERATQESTLDHWKEL | | |
| | | QEQNKTKPEFNVRKVEGTLPPD | | |
| | | VLVIHQSKYKCGMKNHHPEQQS | | |
| | | SLLNLSSSTPTHQESMNTGTLA | | |
| | | SLRGRARRSKGKNKHSKRALLV | | |
| | | CQ | | |
| UBP13_HUMAN | 21 | MQRRGALFGMPGGSGGRKMAAG | 133 | YGPGYTGLKNLGNSCYLSSV |
| Ubiquitin | | DIGELLVPHMPTIRVPRSGDRV | | MQAIFSIPEFQRAYVGNLPR |
| carboxyl- | | YKNECAFSYDSPNSEGGLYVCM | | IFDYSPLDPTQDENTQMTKL |
| terminal | | NTFLAFGREHVERHERKTGQSV | | GHGLLSGQYSKPPVKSELIE |
| hydrolase 13 | | YMHLKRHVREKVRGASGGALPK | | QVMKEEHKPQQNGISPRMEK |
| | | RRNSKIFLDLDTDDDLNSDDYE | | AFVSKSHPEFSSNRQQDAQE |
| | | YEDEAKLVIFPDHYEIALPNIE | | FFLHLVNLVERNRIGSENPS |
| | | ELPALVTIACDAVLSSKSPYRK | | DVERELVEERIQCCQTRKVR |
| | | QDPDTWENELPVSKYANNLTQL | | YTERVDYLMQLPVAMEAATN |
| | | DNGVRIPPSGWKCARCDLRENL | | KDELIAYELTRREAEANRRP |
| | | WLNLTDGSVLCGKWFFDSSGGN | | LPELVRAKIPFSACLQAFSE |
| | | GHALEHYRDMGYPLAVKLGTIT | | PENVDDEWSSALQAKSAGVK |
| | | PDGADVYSFQEEEPVLDPHLAK | | TSRFASFPEYLVVQIKKETE |
| | | HLAHFGIDMLHMHGTENGLQDN | | GLDWVPKKFDVSIDMPDLLD |
| | | DIKLRVSEWEVIQESGTKLKPM | | INHLRARGLQPGEEELPDIS |
| | | YGPGYTGLKNLGNSCYLSSVMQ | | PPIVIPDDSKDRLMNQLIDP |
| | | AIFSIPEFQRAYVGNLPRIFDY | | SDIDESSVMQLAEMGFPLEA |
| | | SPLDPTQDENTQMTKLGHGLLS | | CRKAVYFTGNMGAEVAFNWI |
| | | GQYSKPPVKSELIEQVMKEEHK | | IVHMEEPDFAEPLTMPGYGG |
| | | PQQNGISPRMFKAFVSKSHPEF | | AASAGASVEGASGLDNQPPE |
| | | SSNRQQDAQEFFLHLVNLVERN | | EIVAIITSMGFQRNQAIQAL |
| | | RIGSENPSDVFRELVEERIQCC | | RATNNNLERALDWIFSHPEF |
| | | QTRKVRYTERVDYLMQLPVAME | | EEDSDEVIEMENNANANIIS |
| | | AATNKDELIAYELTRREAEANR | | EAKPEGPRVKDGSGTYELFA |
| | | RPLPELVRAKIPFSACLQAFSE | | FISHMGTSTMSGHYICHIKK |
| | | PENVDDFWSSALQAKSAGVKTS | | EGRWVIYNDHKVCASERPPK |
| | | RFASFPEYLVVQIKKETFGLDW | | DLGYMYFYRRIPS |
| | | VPKKFDVSIDMPDLLDINHLRA | | |
| | | RGLQPGEEELPDISPPIVIPDD | | |
| | | SKDRLMNQLIDPSDIDESSVMQ | | |
| | | LAEMGFPLEACRKAVYFTGNMG | | |
| | | AEVAFNWIIVHMEEPDFAEPLT | | |
| | | MPGYGGAASAGASVEGASGLDN | | |
| | | QPPEEIVAIITSMGFQRNQAIQ | | |
| | | ALRATNNNLERALDWIFSHPEF | | |
| | | EEDSDEVIEMENNANANIISEA | | |
| | | KPEGPRVKDGSGTYELFAFISH | | |
| | | MGTSTMSGHYICHIKKEGRWVI | | |
| | | YNDHKVCASERPPKDLGYMYFY | | |
| | | RRIPS | | |
| UBP11_HUMAN | 22 | MAVAPRLEGGLCFRFRDQNPEV | 134 | KGQPGICGLTNLGNTCEMNS |
| Ubiquitin | | AVEGRLPISHSCVGCRRERTAM | | ALQCLSNVPQLTEYFLNNCY |
| carboxyl- | | ATVAANPAAAAAAVAAAAAVTE | | LEELNERNPLGMKGEIAEAY |
| terminal | | DREPQHEELPGLDSQWRQIENG | | ADLVKQAWSGHHRSIVPHVE |
| hydrolase 11 | | ESGRERPLRAGESWELVEKHWY | | KNKVGHFASQFLGYQQHDSQ |
| | | KQWEAYVQGGDQDSSTFPGCIN | | ELLSFLLDGLHEDLNRVKKK |
| | | NATLFQDEINWRLKEGLVEGED | | EYVELCDAAGRPDQEVAQEA |
| | | YVLLPAAAWHYLVSWYGLEHGQ | | WQNHKRRNDSVIVDTFHGLE |
| | | PPIERKVIELPNIQKVEVYPVE | | KSTLVCPDCGNVSVTFDPFC |
| | | LLLVRHNDLGKSHTVQFSHTDS | | YLSVPLPISHKRVLEVFFIP |
| | | IGLVLRTARERELVEPQEDTRL | | MDPRRKPEQHRLVVPKKGKI |
| | | WAKNSEGSLDRLYDTHITVLDA | | SDLCVALSKHTGISPERMMV |
| | | ALETGQLIIMETRKKDGTWPSA | | ADVESHRFYKLYQLEEPLSS |
| | | QLHVMNNNMSEEDEDEKGQPGI | | ILDRDDIFVYEVSGRIEAIE |
| | | CGLTNLGNTCFMNSALQCLSNV | | GSREDIVVPVYLRERTPARD |
| | | PQLTEYFLNNCYLEELNERNPL | | YNNSYYGLMLFGHPLLVSVP |
| | | GMKGEIAEAYADLVKQAWSGHH | | RDRFTWEGLYNVLMYRLSRY |
| | | RSIVPHVEKNKVGHFASQFLGY | | VTKPNSDDEDDGDEKEDDEE |
| | | QQHDSQELLSFLLDGLHEDLNR | | DKDDVPGPSTGGSLRDPEPE |
| | | VKKKEYVELCDAAGRPDQEVAQ | | QAGPSSGVTNRCPFLLDNCL |
| | | EAWQNHKRRNDSVIVDTFHGLF | | GTSQWPPRRRRKQLFTLQTV |
| | | KSTLVCPDCGNVSVTFDPFCYL | | NSNGTSDRTTSPEEVHAQPY |
| | | SVPLPISHKRVLEVFFIPMDPR | | IAIDWEPEMKKRYYDEVEAE |
| | | RKPEQHRLVVPKKGKISDLCVA | | GYVKHDCVGYVMKKAPVRLQ |
| | | LSKHTGISPERMMVADVESHRE | | ECIELFTTVETLEKENPWYC |
| | | YKLYQLEEPLSSILDRDDIFVY | | PSCKQHQLATKKLDLWMLPE |
| | | EVSGRIEAIEGSREDIVVPVYL | | ILIIHLKRFSYTKESREKLD |
| | | RERTPARDYNNSYYGLMLFGHP | | TLVEFPIRDLDESEFVIQPQ |
| | | LLVSVPRDRETWEGLYNVLMYR | | NESNPELYKYDLIAVSNHYG |
| | | LSRYVTKPNSDDEDDGDEKEDD | | GMRDGHYTTFACNKDSGQWH |
| | | EEDKDDVPGPSTGGSLRDPEPE | | YFDDNSVSPVNENQIESKAA |
| | | QAGPSSGVTNRCPFLLDNCLGT | | YVLFYQRQD |
| | | SQWPPRRRRKQLFTLQTVNSNG | | |
| | | TSDRTTSPEEVHAQPYIAIDWE | | |
| | | PEMKKRYYDEVEAEGYVKHDCV | | |
| | | GYVMKKAPVRLQECIELFTTVE | | |
| | | TLEKENPWYCPSCKQHQLATKK | | |
| | | LDLWMLPEILIIHLKRFSYTKE | | |
| | | SREKLDTLVEFPIRDLDESEFV | | |
| | | IQPQNESNPELYKYDLIAVSNH | | |
| | | YGGMRDGHYTTFACNKDSGQWH | | |
| | | YFDDNSVSPVNENQIESKAAYV | | |
| | | LFYQRQDVARRLLSPAGSSGAP | | |
| | | ASPACSSPPSSEFMDVN | | |
| U17L1_HUMAN | 23 | MGDDSLYLGGEWQFNHFSKLTS | 135 | AVGAGLQNMGNTCYENASLQ |
| Ubiquitin | | SRPDAAFAEIQRTSLPEKSPLS | | CLTYTLPLANYMLSREHSQT |
| carboxyl- | | SETRVDLCDDLAPVARQLAPRE | | CQRPKCCMLCTMQAHITWAL |
| terminal | | KLPLSSRRPAAVGAGLQNMGNT | | HSPGHVIQPSQALAAGFHRG |
| hydrolase 17- | | CYENASLQCLTYTLPLANYMLS | | KQEDVHEFLMFTVDAMKKAC |
| like protein 1 | | REHSQTCQRPKCCMLCTMQAHI | | LPGHKQVDHHCKDTTLIHQI |
| | | TWALHSPGHVIQPSQALAAGFH | | FGGCWRSQIKCLHCHGISDT |
| | | RGKQEDVHEFLMFTVDAMKKAC | | FDPYLDIALDIQAAQSVKQA |
| | | LPGHKQVDHHCKDTTLIHQIFG | | LEQLVKPEELNGENAYHCGL |
| | | GCWRSQIKCLHCHGISDTEDPY | | CLQRAPASNTLTLHTSAKVL |
| | | LDIALDIQAAQSVKQALEQLVK | | ILVLKRFSDVAGNKLAKNVQ |
| | | PEELNGENAYHCGLCLQRAPAS | | YPECLDMQPYMSQQNTGPLV |
| | | NTLTLHTSAKVLILVLKRFSDV | | YVLYAVLVHAGWSCHDGHYF |
| | | AGNKLAKNVQYPECLDMQPYMS | | SYVKAQEVQWYKMDDAEVTV |
| | | QQNTGPLVYVLYAVLVHAGWSC | | CSIISVLSQQAYVLFYIQKS |
| | | HDGHYFSYVKAQEVQWYKMDDA | | |
| | | EVTVCSIISVLSQQAYVLFYIQ | | |
| | | KSEWERHSESVSRGREPRALGA | | |
| | | EDTDRRAKQGELKRDHPCLQAP | | |
| | | ELDEHLVERATQESTLDHWKEL | | |
| | | QEQNKTKPEFNVGKVEGTLPPN | | |
| | | ALVIHQSKYKCGMKNHHPEQQS | | |
| | | SLLNLSSTTRTDQESMNTGTLA | | |
| | | SLQGRTRRAKGKNKHSKRALLV | | |
| | | CQ | | |
| UBP14_HUMAN | 24 | MPLYSVTVKWGKEKFEGVELNT | 136 | ASAMELPCGLTNLGNTCYMN |
| Ubiquitin | | DEPPMVFKAQLFALTGVQPARQ | | ATVQCIRSVPELKDALKRYA |
| carboxyl- | | KVMVKGGTLKDDDWGNIKIKNG | | GALRASGEMASAQYITAALR |
| terminal | | MTLLMMGSADALPEEPSAKTVE | | DLFDSMDKTSSSIPPIILLQ |
| hydrolase 14 | | VEDMTEEQLASAMELPCGLTNL | | FLHMAFPQFAEKGEQGQYLQ |
| | | GNTCYMNATVQCIRSVPELKDA | | QDANECWIQMMRVLQQKLEA |
| | | LKRYAGALRASGEMASAQYITA | | IEDDSVKETDSSSASAATPS |
| | | ALRDLEDSMDKTSSSIPPIILL | | KKKSLIDQFFGVEFETTMKC |
| | | QFLHMAFPQFAEKGEQGQYLQQ | | TESEEEEVTKGKENQLQLSC |
| | | DANECWIQMMRVLQQKLEAIED | | FINQEVKYLFTGLKLRLQEE |
| | | DSVKETDSSSASAATPSKKKSL | | ITKQSPTLQRNALYIKSSKI |
| | | IDQFFGVEFETTMKCTESEEEE | | SRLPAYLTIQMVRFFYKEKE |
| | | VTKGKENQLQLSCFINQEVKYL | | SVNAKVLKDVKFPLMLDMYE |
| | | FTGLKLRLQEEITKQSPTLQRN | | LCTPELQEKMVSERSKEKDL |
| | | ALYIKSSKISRLPAYLTIQMVR | | EDKKVNQQPNTSDKKSSPQK |
| | | FFYKEKESVNAKVLKDVKFPLM | | EVKYEPFSFADDIGSNNCGY |
| | | LDMYELCTPELQEKMVSERSKF | | YDLQAVLTHQGRSSSSGHYV |
| | | KDLEDKKVNQQPNTSDKKSSPQ | | SWVKRKQDEWIKEDDDKVSI |
| | | KEVKYEPFSFADDIGSNNCGYY | | VTPEDILRLSGGGDWHIAYV |
| | | DLQAVLTHQGRSSSSGHYVSWV | | LLYGPRR |
| | | KRKQDEWIKFDDDKVSIVTPED | | |
| | | ILRLSGGGDWHIAYVLLYGPRR | | |
| | | VEIMEEESEQ | | |
| Q13107\|UBP4 | 25 | MAEGGGCRERPDAETQKSELGP | 137 | SHIQPGLCGLGNLGNTCFMN |
| HUMAN | | LMRTTLQRGAQWYLIDSRWFKQ | | SALQCLSNTAPLTDYELKDE |
| Ubiquitin | | WKKYVGFDSWDMYNVGEHNLEP | | YEAEINRDNPLGMKGEIAEA |
| carboxyl- | | GPIDNSGLFSDPESQTLKEHLI | | YAELIKQMWSGRDAHVAPRM |
| terminal | | DELDYVLVPTEAWNKLLNWYGC | | FKTQVGRFAPQFSGYQQQDS |
| hydrolase 4 | | VEGQQPIVRKVVEHGLFVKHCK | | QELLAFLLDGLHEDLNRVKK |
| | | VEVYLLELKLCENSDPTNVLSC | | KPYLELKDANGRPDAVVAKE |
| | | HFSKADTIATIEKEMRKLENIP | | AWENHRLRNDSVIVDTFHGL |
| | | AERETRLWNKYMSNTYEQLSKL | | FKSTLVCPECAKVSVTEDPF |
| | | DNTVQDAGLYQGQVLVIEPQNE | | CYLTLPLPLKKDRVMEVFLV |
| | | DGTWPRQTLQSKSSTAPSRNFT | | PADPHCRPTQYRVTVPLMGA |
| | | TSPKSSASPYSSVSASLIANGD | | VSDLCEALSRLSGIAAENMV |
| | | STSTCGMHSSGVSRGGSGESAS | | VADVYNHRFHKIFQMDEGLN |
| | | YNCQEPPSSHIQPGLCGLGNLG | | HIMPRDDIFVYEVCSTSVDG |
| | | NTCFMNSALQCLSNTAPLTDYF | | SECVTLPVYFRERKSRPSST |
| | | LKDEYEAEINRDNPLGMKGEIA | | SSASALYGQPLLLSVPKHKL |
| | | EAYAELIKQMWSGRDAHVAPRM | | TLESLYQAVCDRISRYVKQP |
| | | FKTQVGRFAPQFSGYQQQDSQE | | LPDEFGSSPLEPGACNGSRN |
| | | LLAFLLDGLHEDLNRVKKKPYL | | SCEGEDEEEMEHQEEGKEQL |
| | | ELKDANGRPDAVVAKEAWENHR | | SETEGSGEDEPGNDPSETTQ |
| | | LRNDSVIVDTFHGLFKSTLVCP | | KKIKGQPCPKRLFTESLVNS |
| | | ECAKVSVTFDPFCYLTLPLPLK | | YGTADINSLAADGKLLKLNS |
| | | KDRVMEVFLVPADPHCRPTQYR | | RSTLAMDWDSETRRLYYDEQ |
| | | VTVPLMGAVSDLCEALSRLSGI | | ESEAYEKHVSMLQPQKKKKT |
| | | AAENMVVADVYNHRFHKIFQMD | | TVALRDCIELFTTMETLGEH |
| | | EGLNHIMPRDDIFVYEVCSTSV | | DPWYCPNCKKHQQATKKEDL |
| | | DGSECVTLPVYFRERKSRPSST | | WSLPKILVVHLKRFSYNRYW |
| | | SSASALYGQPLLLSVPKHKLTL | | RDKLDTVVEFPIRGLNMSEF |
| | | ESLYQAVCDRISRYVKQPLPDE | | VCNLSARPYVYDLIAVSNHY |
| | | FGSSPLEPGACNGSRNSCEGED | | GAMGVGHYTAYAKNKLNGKW |
| | | EEEMEHQEEGKEQLSETEGSGE | | YYFDDSNVSLASEDQIVTKA |
| | | DEPGNDPSETTQKKIKGQPCPK | | AYVLFYQRRD |
| | | RLFTFSLVNSYGTADINSLAAD | | |
| | | GKLLKLNSRSTLAMDWDSETRR | | |
| | | LYYDEQESEAYEKHVSMLQPQK | | |
| | | KKKTTVALRDCIELFTTMETLG | | |
| | | EHDPWYCPNCKKHQQATKKEDL | | |
| | | WSLPKILVVHLKRFSYNRYWRD | | |
| | | KLDTVVEFPIRGLNMSEFVCNL | | |
| | | SARPYVYDLIAVSNHYGAMGVG | | |
| | | HYTAYAKNKLNGKWYYFDDSNV | | |
| | | SLASEDQIVTKAAYVLFYQRRD | | |
| | | DEFYKTPSLSSSGSSDGGTRPS | | |
| | | SSQQGFGDDEACSMDTN | | |
| UBP26_HUMAN | 26 | MAALFLRGFVQIGNCKTGISKS | 138 | KICHGLPNLGNTCYMNAVLQ |
| Ubiquitin | | KEAFIEAVERKKKDRLVLYFKS | | SLLSIPSFADDLLNQSFPWG |
| carboxyl- | | GKYSTFRLSDNIQNVVLKSYRG | | KIPLNALTMCLARLLFFKDT |
| terminal | | NQNHLHLTLQNNNGLFIEGLSS | | YNIEIKEMLLLNLKKAISAA |
| hydrolase 26 | | TDAEQLKIFLDRVHQNEVQPPV | | AEIFHGNAQNDAHEFLAHCL |
| | | RPGKGGSVFSSTTQKEINKTSF | | DQLKDNMEKLNTIWKPKSEF |
| | | HKVDEKSSSKSFEIAKGSGTGV | | GEDNFPKQVFADDPDTSGES |
| | | LQRMPLLTSKLTLTCGELSENQ | | CPVITNFELELLHSIACKAC |
| | | HKKRKRMLSSSSEMNEEFLKEN | | GQVILKTELNNYLSINLPQR |
| | | NSVEYKKSKADCSRCVSYNREK | | IKAHPSSIQSTEDLFFGAEE |
| | | QLKLKELEENKKLECESSCIMN | | LEYKCAKCEHKTSVGVHSES |
| | | ATGNPYLDDIGLLQALTEKMVL | | RLPRILIVHLKRYSLNEFCA |
| | | VFLLQQGYSDGYTKWDKLKLFF | | LKKNDQEVIISKYLKVSSHC |
| | | ELFPEKICHGLPNLGNTCYMNA | | NEGTRPPLPLSEDGEITDFQ |
| | | VLQSLLSIPSFADDLLNQSFPW | | LLKVIRKMTSGNISVSWPAT |
| | | GKIPLNALTMCLARLLFFKDTY | | KESKDILAPHIGSDKESEQK |
| | | NIEIKEMLLLNLKKAISAAAEI | | KGQTVFKGASRRQQQKYLGK |
| | | FHGNAQNDAHEFLAHCLDQLKD | | NSKPNELESVYSGDRAFIEK |
| | | NMEKLNTIWKPKSEFGEDNEPK | | EPLAHLMTYLEDTSLCQFHK |
| | | QVFADDPDTSGFSCPVITNFEL | | AGGKPASSPGTPLSKVDFQT |
| | | ELLHSIACKACGQVILKTELNN | | VPENPKRKKYVKTSKEVAFD |
| | | YLSINLPQRIKAHPSSIQSTED | | RIINPTKDLYEDKNIRIPER |
| | | LFFGAEELEYKCAKCEHKTSVG | | FQKVSEQTQQCDGMRICEQA |
| | | VHSFSRLPRILIVHLKRYSLNE | | PQQALPQSFPKPGTQGHTKN |
| | | FCALKKNDQEVIISKYLKVSSH | | LLRPTKLNLQKSNRNSLLAL |
| | | CNEGTRPPLPLSEDGEITDFQL | | GSNKNPRNKDILDKIKSKAK |
| | | LKVIRKMTSGNISVSWPATKES | | ETKRNDDKGDHTYRLISVVS |
| | | KDILAPHIGSDKESEQKKGQTV | | HLGKTLKSGHYICDAYDFEK |
| | | FKGASRRQQQKYLGKNSKPNEL | | QIWFTYDDMRVLGIQEAQMQ |
| | | ESVYSGDRAFIEKEPLAHLMTY | | EDRRCTGYIFFYMHN |
| | | LEDTSLCQFHKAGGKPASSPGT | | |
| | | PLSKVDFQTVPENPKRKKYVKT | | |
| | | SKFVAFDRIINPTKDLYEDKNI | | |
| | | RIPERFQKVSEQTQQCDGMRIC | | |
| | | EQAPQQALPQSFPKPGTQGHTK | | |
| | | NLLRPTKLNLQKSNRNSLLALG | | |
| | | SNKNPRNKDILDKIKSKAKETK | | |
| | | RNDDKGDHTYRLISVVSHLGKT | | |
| | | LKSGHYICDAYDFEKQIWFTYD | | |
| | | DMRVLGIQEAQMQEDRRCTGYI | | |
| | | FFYMHNEIFEEMLKREENAQLN | | |
| | | SKEVEETLQKE | | |
| UBP19_HUMAN | 27 | MSGGASATGPRRGPPGLEDTTS | 139 | LPGFTGLVNLGNTCEMNSVI |
| Ubiquitin | | KKKQKDRANQESKDGDPRKETG | | QSLSNTRELRDFFHDRSFEA |
| carboxyl- | | SRYVAQAGLEPLASGDPSASAS | | EINYNNPLGTGGRLAIGFAV |
| terminal | | HAAGITGSRHRTRLFFPSSSGS | | LLRALWKGTHHAFQPSKLKA |
| hydrolase 19 | | ASTPQEEQTKEGACEDPHDLLA | | IVASKASQFTGYAQHDAQEF |
| | | TPTPELLLDWRQSAEEVIVKLR | | MAFLLDGLHEDLNRIQNKPY |
| | | VGVGPLQLEDVDAAFTDTDCVV | | TETVDSDGRPDEVVAEEAWQ |
| | | RFAGGQQWGGVFYAEIKSSCAK | | RHKMRNDSFIVDLFQGQYKS |
| | | VQTRKGSLLHLTLPKKVPMLTW | | KLVCPVCAKVSITFDPFLYL |
| | | PSLLVEADEQLCIPPLNSQTCL | | PVPLPQKQKVLPVFYFAREP |
| | | LGSEENLAPLAGEKAVPPGNDP | | HSKPIKFLVSVSKENSTASE |
| | | VSPAMVRSRNPGKDDCAKEEMA | | VLDSLSQSVHVKPENLRLAE |
| | | VAADAATLVDEPESMVNLAFVK | | VIKNRFHRVFLPSHSLDTVS |
| | | NDSYEKGPDSVVVHVYVKEICR | | PSDTLLCFELLSSELAKERV |
| | | DTSRVLFREQDFTLIFQTRDGN | | VVLEVQQRPQVPSVPISKCA |
| | | FLRLHPGCGPHTTFRWQVKLRN | | ACQRKQQSEDEKLKRCTRCY |
| | | LIEPEQCTFCFTASRIDICLRK | | RVGYCNQLCQKTHWPDHKGL |
| | | RQSQRWGGLEAPAARVGGAKVA | | CRPENIGYPFLVSVPASRLT |
| | | VPTGPTPLDSTPPGGAPHPLTG | | YARLAQLLEGYARYSVSVFQ |
| | | QEEARAVEKDKSKARSEDTGLD | | PPFQPGRMALESQSPGCTTL |
| | | SVATRTPMEHVTPKPETHLASP | | LSTGSLEAGDSERDPIQPPE |
| | | KPTCMVPPMPHSPVSGDSVEEE | | LQLVTPMAEGDTGLPRVWAA |
| | | EEEEKKVCLPGFTGLVNLGNTC | | PDRGPVPSTSGISSEMLASG |
| | | FMNSVIQSLSNTRELRDFFHDR | | PIEVGSLPAGERVSRPEAAV |
| | | SFEAEINYNNPLGTGGRLAIGF | | PGYQHPSEAMNAHTPQFFIY |
| | | AVLLRALWKGTHHAFQPSKLKA | | KIDSSNREQRLEDKGDTPLE |
| | | IVASKASQFTGYAQHDAQEFMA | | LGDDCSLA |
| | | FLLDGLHEDLNRIQNKPYTETV | | LVWRNNERLQEFVLVASKEL |
| | | DSDGRPDEVVAEEAWQRHKMRN | | ECAEDPGSAGEAARAGHFTL |
| | | DSFIVDLFQGQYKSKLVCPVCA | | DQCLNLFTRPEVLAPEEAWY |
| | | KVSITFDPFLYLPVPLPQKQKV | | CPQCKQHREASKQLLLWRLP |
| | | LPVFYFAREPHSKPIKFLVSVS | | NVLIVQLKRFSFRSFIWRDK |
| | | KENSTASEVLDSLSQSVHVKPE | | INDLVEFPVRNLDLSKFCIG |
| | | NLRLAEVIKNRFHRVFLPSHSL | | QKEEQLPSYDLYAVINHYGG |
| | | DTVSPSDTLLCFELLSSELAKE | | MIGGHYTACARLPNDRSSQR |
| | | RVVVLEVQQRPQVPSVPISKCA | | SDVGWRLFDDSTVTTVDESQ |
| | | ACQRKQQSEDEKLKRCTRCYRV | | VVTRYAYVLFYRRRN |
| | | GYCNQLCQKTHWPDHKGLCRPE | | |
| | | NIGYPFLVSVPASRLTYARLAQ | | |
| | | LLEGYARYSVSVFQPPFQPGRM | | |
| | | ALESQSPGCTTLLSTGSLEAGD | | |
| | | SERDPIQPPELQLVTPMAEGDT | | |
| | | GLPRVWAAPDRGPVPSTSGISS | | |
| | | EMLASGPIEVGSLPAGERVSRP | | |
| | | EAAVPGYQHPSEAMNAHTPQFF | | |
| | | IYKIDSSNREQRLEDKGDTPLE | | |
| | | LGDDCSLALVWRNNERLQEFVL | | |
| | | VASKELECAEDPGSAGEAARAG | | |
| | | HFTLDQCLNLFTRPEVLAPEEA | | |
| | | WYCPQCKQHREASKQLLLWRLP | | |
| | | NVLIVQLKRFSFRSFIWRDKIN | | |
| | | DLVEFPVRNLDLSKFCIGQKEE | | |
| | | QLPSYDLYAVINHYGGMIGGHY | | |
| | | TACARLPNDRSSQRSDVGWRLF | | |
| | | DDSTVTTVDESQVVTRYAYVLF | | |
| | | YRRRNSPVERPPRAGHSEHHPD | | |
| | | LGPAAEAAASQASRIWQELEAE | | |
| | | EEPVPEGSGPLGPWGPQDWVGP | | |
| | | LPRGPTTPDEGCLRYFVLGTVA | | |
| | | ALVALVLNVFYPLVSQSRWR | | |
| UBP10_HUMAN | 28 | MALHSPQYIFGDESPDEFNQFF | 140 | SLQPRGLINKGNWCYINATL |
| Ubiquitin | | VTPRSSVELPPYSGTVLCGTQA | | QALVACPPMYHLMKFIPLYS |
| carboxyl- | | VDKLPDGQEYQRIEFGVDEVIE | | KVQRPCTSTPMIDSFVRLMN |
| terminal | | PSDTLPRTPSYSISSTLNPQAP | | EFTNMPVPPKPRQALGDKIV |
| hydrolase 10 | | EFILGCTASKITPDGITKEASY | | RDIRPGAAFEPTYIYRLLTV |
| | | GSIDCQYPGSALALDGSSNVEA | | NKSSLSEKGRQEDAEEYLGE |
| | | EVLENDGVSGGLGQRERKKKKK | | ILNGLHEEMLNLKKLLSPSN |
| | | RPPGYYSYLKDGGDDSISTEAL | | EKLTISNGPKNHSVNEEEQE |
| | | VNGHANSAVPNSVSAEDAEFMG | | EQGEGSEDEWEQVGPRNKTS |
| | | DMPPSVTPRTCNSPQNSTDSVS | | VTRQADFVQTPITGIFGGHI |
| | | DIVPDSPFPGALGSDTRTAGQP | | RSVVYQQSSKESATLQPFFT |
| | | EGGPGADFGQSCFPAEAGRDTL | | LQLDIQSDKIRTVQDALESL |
| | | SRTAGAQPCVGTDTTENLGVAN | | VARESVQGYTTKTKQEVEIS |
| | | GQILESSGEGTATN | | RRVTLEKLPPVLVLHLKREV |
| | | GVELHTTESIDLDPTKPESASP | | YEKTGGCQKLIKNIEYPVDL |
| | | PADGTGSASGTLPVSQPKSWAS | | EISKELLSPGVKNKNFKCHR |
| | | LFHDSKPSSSSPVAYVETKYSP | | TYRLFAVVYHHGNSATGGHY |
| | | PAISPLVSEKQVEVKEGLVPVS | | TTDVFQIGLNGWLRIDDQTV |
| | | EDPVAIKIAELLENVTLIHKPV | | KVINQYQVVKPTAERTAYLL |
| | | SLQPRGLINKGNWCYINATLQA | | YYRRVD |
| | | LVACPPMYHLMKFIPLYSKVQR | | |
| | | PCTSTPMIDSFVRLMNEFTNMP | | |
| | | VPPKPRQALGDKIVRDIRPGAA | | |
| | | FEPTYIYRLLTVNKSSLSEKGR | | |
| | | QEDAEEYLGFILNGLHEEMLNL | | |
| | | KKLLSPSNEKLTISNGPKNHSV | | |
| | | NEEEQEEQGEGSEDEWEQVGPR | | |
| | | NKTSVTRQADFVQT | | |
| | | PITGIFGGHIRSVVYQQSSKES | | |
| | | ATLQPFFTLQLDIQSDKIRTVQ | | |
| | | DALESLVARESVQGYTTKTKQE | | |
| | | VEISRRVTLEKLPPVLVLHLKR | | |
| | | FVYEKTGGCQKLIKNIEYPVDL | | |
| | | EISKELLSPGVKNKNFKCHRTY | | |
| | | RLFAVVYHHGNSATGGHYTTDV | | |
| | | FQIGLNGWLRIDDQTVKVINQY | | |
| | | QVVKPTAERTAYLLYYRRVDLL | | |
| UBP49_HUMAN | 29 | MDRCKHVGRLRLAQDHSILNPQ | 141 | MDRCKHVGRLRLAQDHSILN |
| Ubiquitin | | KWCCLECATTESVWACLKCSHV | | PQKWCCLECATTESVWACLK |
| carboxyl- | | ACGRYIEDHALKHFEETGHPLA | | CSHVACGRYIEDHALKHFEE |
| terminal | | MEVRDLYVFCYLCKDYVLNDNP | | TGHPLAMEVRDLYVFCYLCK |
| hydrolase 49 | | EGDLKLLRSSLLAVRGQKQDTP | | DYVLNDNPEGDLKLLRSSLL |
| | | VRRGRTLRSMASGEDVVLPQRA | | AVRGQKQDTPVRRGRTLRSM |
| | | PQGQPQMLTALWYRRQRLLART | | ASGEDVVLPQRAPQGQPQML |
| | | LRLWFEKSSRGQAKLEQRRQEE | | TALWYRRQRLLARTLRLWFE |
| | | ALERKKEEARRRRREVKRRLLE | | KSSRGQAKLEQRRQEEALER |
| | | ELASTPPRKSARLLLHTPRDAG | | KKEEARRRRREVKRRLLEEL |
| | | PAASRPAALPTSRRVPAATLKL | | ASTPPRKSARLLLHTPRDAG |
| | | RRQPAMAPGVTGLRNLGNTCYM | | PAASRPAALPTSRRVPAATL |
| | | NSILQVLSHLQKFRECFLNLDP | | KLRRQPAMAPGVTGLRNLGN |
| | | SKTEHLFPKATNGK | | TCYMNSILQVLSHLQKFREC |
| | | TQLSGKPTNSSATELSLRNDRA | | FLNLDPSKTEHLFPKATNGK |
| | | EACEREGFCWNGRASISRSLEL | | TQLSGKPTNSSATELSLRND |
| | | IQNKEPSSKHISLCRELHTLER | | RAEACEREGFCWNGRASISR |
| | | VMWSGKWALVSPFAMLHSVWSL | | SLELIQNKEPSSKHISLCRE |
| | | IPAFRGYDQQDAQEFLCELLHK | | LHTLFRVMWSGKWALVSPFA |
| | | VQQELESEGTTRRILIPFSQRK | | MLHSVWSLIPAFRGYDQQDA |
| | | LTKQVLKVVNTIFHGQLLSQVT | | QEFLCELLHKVQQELESEGT |
| | | CISCNYKSNTIEPFWDLSLEEP | | TRRILIPFSQRKLTKQVLKV |
| | | ERYHCIEKGFVPLNQTECLLTE | | VNTIFHGQLLSQVTCISCNY |
| | | MLAKFTETEALEGRIYACDQCN | | KSNTIEPFWDLSLEFPERYH |
| | | SKRRKSNPKPLVLSEARKQLMI | | CIEKGFVPLNQTECLLTEML |
| | | YRLPQVLRLHLKRFRWSGRNHR | | AKFTETEALEGRIYACDQCN |
| | | EKIGVHVVEDQVLTMEPYCCRD | | SKRRKSNPKPLVLSEARKQL |
| | | MLSSLDKETFAYDL | | MIYRLPQVLRLHLKRFRWSG |
| | | SAVVMHHGKGFGSGHYTAYCYN | | RNHREKIGVHVVEDQVLTME |
| | | TEGGFWVHCNDSKLNVCSVEEV | | PYCCRDMLSSLDKETFAYDL |
| | | CKTQAYILFYTQRTVQGNARIS | | SAVVMHHGKGFGSGHYTAYC |
| | | ETHLQAQVQSSNNDEGRPQTES | | YNTEGGFWVHCNDSKLNVCS |
| | | | | VEEVCKTQAYILFYTQRT |
| U17L8_HUMAN | 30 | MEDDSLYLGGEWQFNHESKLTS | 142 | AVGAGLQNMGNTCYLNASLQ |
| Inactive | | PRPDAAFAEIQRTSLPEKSPLS | | CLTYTPPLANYMLSREHSQT |
| ubiquitin | | SETRVDLCDDLAPVARQLAPRE | | CQRPKCCMLCTMQAHITWAL |
| carboxyl- | | KLPLSSRRPAAVGAGLQNMGNT | | HSPGHVIQPSQALAAGFHRG |
| terminal | | CYLNASLQCLTYTPPLANYMLS | | KQEDAHEFLMFTVDAMKKAC |
| hydrolase 17- | | REHSQTCQRPKCCMLCTMQAHI | | LPGHKQVDHHSKDTTLIHQI |
| like protein 8 | | TWALHSPGHVIQPSQALAAGFH | | FGGCWRSQIKCLHCHGISDT |
| | | RGKQEDAHEFLMFTVDAMKKAC | | FDPYLDIALDIQAAQSVKQA |
| | | LPGHKQVDHHSKDTTLIHQIFG | | LEQLVKPEELNGENAYPCGL |
| | | GCWRSQIKCLHCHGISDTEDPY | | CLQRAPASNTLTLHTSAKVL |
| | | LDIALDIQAAQSVKQALEQLVK | | ILVLKRFCDVTGNKLAKNVQ |
| | | PEELNGENAYPCGLCLQRAPAS | | YPECLDMQPYMSQQNTGPLV |
| | | NTLTLHTSAKVLILVLKRFCDV | | YVLYAVLVHAGWSCHNGYYF |
| | | TGNKLAKNVQYPEC | | SYVKAQEGQWYKMDDAEVTA |
| | | LDMQPYMSQQNTGPLVYVLYAV | | CSITSVLSQQAYVLFYIQKS |
| | | LVHAGWSCHNGYYFSYVKAQEG | | |
| | | QWYKMDDAEVTACSITSVLSQQ | | |
| | | AYVLFYIQKSEWERHSESVSRG | | |
| | | REPRALGAEDTDRPATQGELKR | | |
| | | DHPCLQVPELDEHLVERATEES | | |
| | | TLDHWKFPQEQNKMKPEFNVRK | | |
| | | VEGTLPPNVLVIHQSKYKCGMK | | |
| | | NHHPEQQSSLLNLSSMNSTDQE | | |
| | | SMNTGTLASLQGRTRRSKGKNK | | |
| | | HSKRSLLVCQ | | |
| 6VN6_1 | 31 | GSKKHTGYVGLKNQGATCYMNS | 143 | TGYVGLKNQGATCYMNSLLQ |
| | | LLQTLFFTNQLRKAVYMMPTEG | | TLFFTNQLRKAVYMMPTEGD |
| | | DDSSKSVPLALQRVFYELQHSD | | DSSKSVPLALQRVFYELQHS |
| | | KPVGTKKLTKSFGWETLDSFMQ | | DKPVGTKKLTKSFGWETLDS |
| | | HDVQELCRVLLDNVENKMKGTC | | FMQHDVQELCRVLLDNVENK |
| | | VEGTIPKLFRGKMVSYIQCKEV | | MKGTCVEGTIPKLFRGKMVS |
| | | DYRSDRREDYYDIQLSIKGKKN | | YIQCKEVDYRSDRREDYYDI |
| | | IFESFVDYVAVEQLDGDNKYDA | | QLSIKGKKNIFESFVDYVAV |
| | | GEHGLQEAEKGVKFLTLPPVLH | | EQLDGDNKYDAGEHGLQEAE |
| | | LQLMRFMYDPQTDQNIKINDRE | | KGVKFLTLPPVLHLQLMREM |
| | | EFPEQLPLDEFLQKTDPKDPAN | | YDPQTDQNIKINDRFEFPEQ |
| | | YILHAVLVHSGDNHGGHYVVYL | | LPLDEFLQKTDPKDPANYIL |
| | | NPKGDGKWCKFDDDVVSRCTKE | | HAVLVHSGDNHGGHYVVYLN |
| | | EAIEHNYGGHDDDLSVRHCTNA | | PKGDGKWCKFDDDVVSRCTK |
| | | YMLVYIRESKLSEVLQAVTDHD | | EEAIEHNYGGHDDDLSVRHC |
| | | IPQQLVERLQEEKRIEAQKR | | TNAYMLVYIRE |
| 6DGF_1 | 32 | AQGLAGLRNLGNTCEMNSILQC | 144 | AQGLAGLRNLGNTCEMNSIL |
| | | LSNTRELRDYCLQRLYMRDLHH | | QCLSNTRELRDYCLQRLYMR |
| | | GSNAHTALVEEFAKLIQTIWTS | | DLHHGSNAHTALVEEFAKLI |
| | | SPNDVVSPSEFKTQIQRYAPRE | | QTIWTSSPNDVVSPSEFKTQ |
| | | VGYNQQDAQEFLRFLLDGLHNE | | IQRYAPRFVGYNQQDAQEFL |
| | | VNRVTLRPKSNPENLDHLPDDE | | RFLLDGLHNEVNRVTLRPKS |
| | | KGRQMWRKYLEREDSRIGDLFV | | NPENLDHLPDDEKGRQMWRK |
| | | GQLKSSLTCTDCGYCSTVEDPF | | YLEREDSRIGDLFVGQLKSS |
| | | WDLSLPIAKRGYPEVTLMDCMR | | LTCTDCGYCSTVEDPEWDLS |
| | | LFTKEDVLDGDEKPTCCRCRGR | | LPIAKRGYPEVTLMDCMRLF |
| | | KRCIKKFSIQRFPKILVLHLKR | | TKEDVLDGDEKPTCCRCRGR |
| | | FSESRIRTSKLTTFVNFPLRDL | | KRCIKKFSIQRFPKILVLHL |
| | | DLREFASENTNHAVYNLYAVSN | | KRFSESRIRTSKLTTFVNFP |
| | | HSGTTMGGHYTAYCRSPGTGEW | | LRDLDLREFASENTNHAVYN |
| | | HTENDSSVTPMSSSQVRTSDAY | | LYAVSNHSGTTMGGHYTAYC |
| | | LLFYELASPPSRM | | RSPGTGEWHTENDSSVTPMS |
| | | | | SSQVRTSDAYLLFYELAS |
| 2VHF_1 | 33 | GLEIMIGKKKGIQGHYNSCYLD | 145 | MIGKKKGIQGHYNSCYLDST |
| | | STLFCLFAFSSVLDTVLLRPKE | | LFCLFAFSSVLDTVLLRPKE |
| | | KNDVEYYSETQELLRTEIVNPL | | KNDVEYYSETQELLRTEIVN |
| | | RIYGYVCATKIMKLRKILEKVE | | PLRIYGYVCATKIMKLRKIL |
| | | AASGFTSEEKDPEEFLNILFHH | | EKVEAASGFTSEEKDPEEFL |
| | | ILRVEPLLKIRSAGQKVQDCYF | | NILFHHILRVEPLLKIRSAG |
| | | YQIFMEKNEKVGVPTIQQLLEW | | QKVQDCYFYQIFMEKNEKVG |
| | | SFINSNLKFAEAPSCLIIQMPR | | VPTIQQLLEWSFINSNLKFA |
| | | FGKDFKLEKKIFPSLELNITDL | | EAPSCLIIQMPREGKDFKLE |
| | | LEDTPRQCRICGGLAMYECREC | | KKIFPSLELNITDLLEDTPR |
| | | YDDPDISAGKIKQFCKTCNTQV | | QCRICGGLAMYECRECYDDP |
| | | HLHPKRLNHKYNPVSLPKDLPD | | DISAGKIKQFCKTCNTQVHL |
| | | WDWRHGCIPCQNMELFAVLCIE | | HPKRLNHKYNPVSLPKDLPD |
| | | TSHYVAFVKYGKDDSAWLFFDS | | WDWRHGCIPCQNMELFAVLC |
| | | MADRDGGQNGFNIPQVTPCPEV | | IETSHYVAFVKYGKDDSAWL |
| | | GEYLKMSLEDLHSLDSRRIQGC | | FFDSMADRDGGQNGFNIPQV |
| | | ARRLLCDAYMCMYQSPTMSLYK | | TPCPEVGEYLKMSLEDLHSL |
| | | | | DSRRIQGCARRLLCDAYMCM |
| | | | | YQS |
| U17LI_HUMAN | 34 | MEDDSLYLGGEWQFNHFSKLTS | 146 | AVGAGLQNMGNTCYVNASLQ |
| Ubiquitin | | SRPDAAFAEIQRTSLPEKSPLS | | CLTYTPPLANYMLSREHSQT |
| carboxyl- | | CETRVDLCDDLAPVARQLAPRE | | CHRHKGCMLCTMQAHITRAL |
| terminal | | KLPLSSRRPAAVGAGLQNMGNT | | HNPGHVIQPSQALAAGFHRG |
| hydrolase 17- | | CYVNASLQCLTYTPPLANYMLS | | KQEDAHEFLMFTVDAMKKAC |
| like protein 18 | | REHSQTCHRHKGCMLCTMQAHI | | LPGHKQVDHHSKDTTLIHQI |
| | | TRALHNPGHVIQPSQALAAGFH | | FGGYWRSQIKCLHCHGISDT |
| | | RGKQEDAHEFLMFTVDAMKKAC | | FDPYLDIALDIQAAQSVQQA |
| | | LPGHKQVDHHSKDTTLIHQIFG | | LEQLVKPEELNGENAYHCGV |
| | | GYWRSQIKCLHCHGISDTEDPY | | CLQRAPASKTLTLHTSAKVL |
| | | LDIALDIQAAQSVQQALEQLVK | | ILVLKRFSDVTGNKIAKNVQ |
| | | PEELNGENAYHCGVCLQRAPAS | | YPECLDMQPYMSQTNTGPLV |
| | | KTLTLHTSAKVLILVLKRESDV | | YVLYAVLVHAGWSCHNGHYF |
| | | TGNKIAKNVQYPEC | | SYVKAQEGQWYKMDDAEVTA |
| | | LDMQPYMSQTNTGPLVYVLYAV | | SSITSVLSQQAYVLFYIQKS |
| | | LVHAGWSCHNGHYFSYVKAQEG | | |
| | | QWYKMDDAEVTASSITSVLSQQ | | |
| | | AYVLFYIQKSEWERHSESVSRG | | |
| | | REPRALGAEDTDRRAKQGELKR | | |
| | | DHPCLQAPELDEHLVERATQES | | |
| | | TLDHWKFLQEQNKTKPEFNVRK | | |
| | | VEGTLPPDVLVIHQSKYKCGMK | | |
| | | NHHPEQQSSLLNLSSTTPTHQE | | |
| | | SMNTGTLASLRGRARRSKGKNK | | |
| | | HSKRALLVCQ | | |
| UBP22_HUMAN | 35 | MVSRPEPEGEAMDAELAVAPPG | 147 | LGNTCFMNCIVQALTHTPLL |
| Ubiquitin | | CSHLGSFKVDNWKQNLRAIYQC | | RDFFLSDRHRCEMQSPSSCL |
| carboxyl- | | FVWSGTAEARKRKAKSCICHVC | | VCEMSSLFQEFYSGHRSPHI |
| terminal | | GVHLNRLHSCLYCVFFGCFTKK | | PYKLLHLVWTHARHLAGYEQ |
| hydrolase 22 | | HIHEHAKAKRHNLAIDLMYGGI | | QDAHEFLIAALDVLHRHCKG |
| | | YCFLCQDYIYDKDMEIIAKEEQ | | DDNGKKANNPNHCNCIIDQI |
| | | RKAWKMQGVGEKESTWEPTKRE | | FTGGLQSDVTCQVCHGVSTT |
| | | LELLKHNPKRRKITSNCTIGLR | | IDPFWDISLDLPGSSTPFWP |
| | | GLINLGNTCEMNCIVQALTHTP | | LSPGSEGNVVNGESHVSGTT |
| | | LLRDFFLSDRHRCEMQSPSSCL | | TLTDCLRRFTRPEHLGSSAK |
| | | VCEMSSLFQEFYSGHRSPHIPY | | IKCSGCHSYQESTKQLTMKK |
| | | KLLHLVWTHARHLAGYEQQDAH | | LPIVACFHLKRFEHSAKLRR |
| | | EFLIAALDVLHRHCKGDDNGKK | | KITTYVSFPLELDMTPEMAS |
| | | ANNPNHCNCIIDQIFTGGLQSD | | SKESRMNGQYQQPTDSLNND |
| | | VTCQVCHGVSTTIDPFWDISLD | | NKYSLFAVVNHQGTLESGHY |
| | | LPGSSTPFWPLSPGSEGNVVNG | | TSFIRQHKDQWFKCDDAIIT |
| | | ESHVSGTTTLTDCLRRFTRPEH | | KASIKDVLDSEGYLLFYHKQ |
| | | LGSSAKIKCSGCHSYQESTKQL | | E |
| | | TMKKLPIVACFHLKRFEHSAKL | | |
| | | RRKITTYVSFPLELDMTPEMAS | | |
| | | SKESRMNGQYQQPTDSLNNDNK | | |
| | | YSLFAVVNHQGTLESGHYTSFI | | |
| | | RQHKDQWFKCDDAIITKASIKD | | |
| | | VLDSEGYLLFYHKQFLEYE | | |
| UBP18_HUMAN | 36 | MSKAFGLLRQICQSILAESSQS | 148 | KGLVPGLVNLGNTCEMNSLL |
| Ubl | | PADLEEKKEEDSNMKREQPRER | | QGLSACPAFIRWLEEFTSQY |
| carboxyl- | | PRAWDYPHGLVGLHNIGQTCCL | | SRDQKEPPSHQYLSLTLLHL |
| terminal | | NSLIQVFVMNVDFTRILKRITV | | LKALSCQEVTDDEVLDASCL |
| hydrolase 18 | | PRGADEQRRSVPFQMLLLLEKM | | LDVLRMYRWQISSFEEQDAH |
| | | QDSRQKAVRPLELAYCLQKCNV | | ELFHVITSSLEDERDRQPRV |
| | | PLFVQHDAAQLYLKLWNLIKDQ | | THLFDVHSLEQQSEITPKQI |
| | | ITDVHLVERLQALYTIRVKDSL | | TCRTRGSPHPTSNHWKSQHP |
| | | ICVDCAMESSRNSSMLTLPLSL | | FHGRLTSNMVCKHCEHQSPV |
| | | FDVDSKPLKTLEDALHCFFQPR | | RFDTFDSLSLSIPAATWGHP |
| | | ELSSKSKCFCENCGKKTRGKQV | | LTLDHCLHHFISSESVRDVV |
| | | LKLTHLPQTLTIHLMRESIRNS | | CDNCTKIEAKGTLNGEKVEH |
| | | QTRKICHSLYFPQSLDESQILP | | QRTTFVKQLKLGKLPQCLCI |
| | | MKRESCDAEEQSGG | | HLQRLSWSSHGTPLKRHEHV |
| | | QYELFAVIAHVGMADSGHYCVY | | QFNEFLMMDIYKYHLLGHKP |
| | | IRNAVDGKWFCENDSNICLVSW | | SQHNPKLNKNPGPTLELQDG |
| | | EDIQCTYGNPNYHWQETAYLLV | | PGAPTPVLNQPGAPKTQIFM |
| | | YMKMEC | | NGACSPSLLPTLSAPMPFPL |
| | | | | PVVPDYSSSTYLERLMAVVV |
| | | | | HHGDMHSGHFVTYRRSPPSA |
| | | | | RNPLSTSNQWLWVSDDTVRK |
| | | | | ASLQEVLSSSAYLLEYERVL |
| UBP28_HUMAN | 37 | MTAELQQDDAAGAADGHGSSCQ | 149 | GWPVGLKNVGNTCWFSAVIQ |
| Ubiquitin | | MLLNQLREITGIQDPSFLHEAL | | SLFQLPEFRRLVLSYSLPQN |
| carboxyl- | | KASNGDITQAVSLLTDERVKEP | | VLENCRSHTEKRNIMEMQEL |
| terminal | | SQDTVATEPSEVEGSAANKEVL | | QYLFALMMGSNRKFVDPSAA |
| hydrolase 28 | | AKVIDLTHDNKDDLQAAIALSL | | LDLLKGAFRSSEEQQQDVSE |
| | | LESPKIQADGRDLNRMHEATSA | | FTHKLLDWLEDAFQLAVNVN |
| | | ETKRSKRKRCEVWGENPNPNDW | | SPRNKSENPMVQLFYGTELT |
| | | RRVDGWPVGLKNVGNTCWFSAV | | EGVREGKPFCNNETFGQYPL |
| | | IQSLFQLPEFRRLVLSYSLPQN | | QVNGYRNLDECLEGAMVEGD |
| | | VLENCRSHTEKRNIMFMQELQY | | VELLPSDHSVKYGQERWFTK |
| | | LFALMMGSNRKFVDPSAALDLL | | LPPVLTFELSRFEFNQSLGQ |
| | | KGAFRSSEEQQQDVSEFTHKLL | | PEKIHNKLEFPQIIYMDRYM |
| | | DWLEDAFQLAVNVNSPRNKSEN | | YRSKELIRNKRECIRKLKEE |
| | | PMVQLFYGTELTEG | | IKILQQKLERYVKYGSGPAR |
| | | VREGKPFCNNETFGQYPLQVNG | | FPLPDMLKYVIEFASTKPAS |
| | | YRNLDECLEGAMVEGDVELLPS | | ESCPPESDTHMTLPLSSVHC |
| | | DHSVKYGQERWFTKLPPVLTFE | | SVSDQTSKESTSTESSSQDV |
| | | LSRFEFNQSLGQPEKIHNKLEF | | ESTESSPEDSLPKSKPLTSS |
| | | PQIIYMDRYMYRSKELIRNKRE | | RSSMEMPSQPAPRTVTDEEI |
| | | CIRKLKEEIKILQQKLERYVKY | | NFVKTCLQRWRSEIEQDIQD |
| | | GSGPARFPLPDMLKYVIEFAST | | LKTCIASTTQTIEQMYCDPL |
| | | KPASESCPPESDTHMTLPLSSV | | LRQVPYRLHAVLVHEGQANA |
| | | HCSVSDQTSKESTSTESSSQDV | | GHYWAYIYNQPRQSWLKYND |
| | | ESTESSPEDSLPKSKPLTSSRS | | ISVTESSWEEVERDSYGGLR |
| | | SMEMPSQPAPRTVTDEEINFVK | | NVSAYCLMYINDKLPY |
| | | TCLQRWRSEIEQDIQDLKTCIA | | |
| | | STTQTIEQMYCDPLLRQVPYRL | | |
| | | HAVLVHEGQANAGHYWAYIYNQ | | |
| | | PRQSWLKYNDISVTESSWEEVE | | |
| | | RDSYGGLRNVSAYCLMYINDKL | | |
| | | PYFNAEAAPTESDQMSEVEALS | | |
| | | VELKHYIQEDNWRFEQEVEEWE | | |
| | | EEQSCKIPQMESSINSSSQDYS | | |
| | | TSQEPSVASSHGVRCLSSEHAV | | |
| | | IVKEQTAQAIANTARAYEKSGV | | |
| | | EAALSEVMLSPAMQGVILAIAK | | |
| | | ARQTFDRDGSEAGLIKAFHEEY | | |
| | | SRLYQLAKETPTSHSDPRLQHV | | |
| | | LVYFFQNEAPKRVVERTLLEQF | | |
| | | ADKNLSYDERSISIMKVAQAKL | | |
| | | KEIGPDDMNMEEYKKWHEDYSL | | |
| | | FRKVSVYLLTGLELYQKGKYQE | | |
| | | ALSYLVYAYQSNAALLMKGPRR | | |
| | | GVKESVIALYRRKCLLELNAKA | | |
| | | ASLFETNDDHSVTEGINVMNEL | | |
| | | IIPCIHLIINNDISKDDLDAIE | | |
| | | VMRNHWCSYLGQDIAENLQLCL | | |
| | | GEFLPRLLDPSAEIIVLKEPPT | | |
| | | IRPNSPYDLCSRFAAVMESIQG | | |
| | | VSTVTVK | | |
| | | MEDDSLYLGGEWQFNHFSKLTS | | |
| | | SRPDAAFAEIQRTSLPEKSPLS | | |
| | | SEARVDLCDDLAPVARQLAPRK | | |
| | | KLPLSSRRPAAVGAGLQNMGNT | | |
| | | CYENASLQCLTYTPPLANYMLS | | |
| U17L2_HUMAN | 38 | REHSQTCQRPKCCMLCTMQAHI | 150 | AVGAGLQNMGNTCYENASLQ |
| Ubiquitin | | TWALHSPGHVIQPSQALAAGFH | | CLTYTPPLANYMLSREHSQT |
| carboxyl- | | RGKQEDAHEFLMFTVDAMKKAC | | CQRPKCCMLCTMQAHITWAL |
| terminal | | LPGHKQVDHHSKDTTLIHQIFG | | HSPGHVIQPSQALAAGFHRG |
| hydrolase 17 | | GCWRSQIKCLHCHGISDTFDPY | | KQEDAHEFLMFTVDAMKKAC |
| | | LDIALDIQAAQSVKQALEQLVK | | LPGHKQVDHHSKDTTLIHQI |
| | | PEELNGENAYHCGLCLQRAPAS | | FGGCWRSQIKCLHCHGISDT |
| | | KTLTLHTSAKVLILVLKRESDV | | FDPYLDIALDIQAAQSVKQA |
| | | TGNKLAKNVQYPEC | | LEQLVKPEELNGENAYHCGL |
| | | LDMQPYMSQQNTGPLVYVLYAV | | CLQRAPASKTLTLHTSAKVL |
| | | LVHAGWSCHDGHYFSYVKAQEG | | ILVLKRFSDVTGNKLAKNVQ |
| | | QWYKMDDAKVTACSITSVLSQQ | | YPECLDMQPYMSQQNTGPLV |
| | | AYVLFYIQKSEWERHSESVSRG | | YVLYAVLVHAGWSCHDGHYF |
| | | REPRALGAEDTDRRATQGELKR | | SYVKAQEGQWYKMDDAKVTA |
| | | DHPCLQAPELDERLVERATQES | | CSITSVLSQQAYVLFYIQKS |
| | | TLDHWKFPQEQNKTKPEFNVRK | | |
| | | VEGTLPPNVLVIHQSKYKCGMK | | |
| | | NHHPEQQSSLLNLSSTTRTDQE | | |
| | | SVNTGTLASLQGRTRRSKGKNK | | |
| | | HSKRALLVCQ | | |
| UBP31_HUMAN | 39 | MSKVTAPGSGPPAAASGKEKRS | 151 | PVPGVAGLRNHGNTCEMNAT |
| Ubiquitin | | FSKRLERSGRAGGGGAGGPGAS | | LQCLSNTELFAEYLALGQYR |
| carboxyl- | | GPAAPSSPSSPSSARSVGSEMS | | AGRPEPSPDPEQPAGRGAQG |
| terminal | | RVLKTLSTLSHLSSEGAAPDRG | | QGEVTEQLAHLVRALWTLEY |
| hydrolase 31 | | GLRSCFPPGPAAAPTPPPCPPP | | TPQHSRDFKTIVSKNALQYR |
| | | PASPAPPACAAEPVPGVAGLRN | | GNSQHDAQEFLLWLLDRVHE |
| | | HGNTCFMNATLQCLSNTELFAE | | DLNHSVKQSGQPPLKPPSET |
| | | YLALGQYRAGRPEPSPDPEQPA | | DMMPEGPSFPVCSTEVQELE |
| | | GRGAQGQGEVTEQLAHLVRALW | | QAQYRSSLTCPHCQKQSNTF |
| | | TLEYTPQHSRDFKTIVSKNALQ | | DPFLCISLPIPLPHTRPLYV |
| | | YRGNSQHDAQEFLLWLLDRVHE | | TVVYQGKCSHCMRIGVAVPL |
| | | DLNHSVKQSGQPPLKPPSETDM | | SGTVARLREAVSMETKIPTD |
| | | MPEGPSFPVCSTFVQELFQAQY | | QIVLTEMYYDGFHRSFCDTD |
| | | RSSLTCPHCQKQSN | | DLETVHESDCIFAFETPEIF |
| | | TFDPFLCISLPIPLPHTRPLYV | | RPEGILSQRGIHLNNNLNHL |
| | | TVVYQGKCSHCMRIGVAVPLSG | | KFGLDYHRLSSPTQTAAKQG |
| | | TVARLREAVSMETKIPTDQIVL | | KMDSPTSRAGSDKIVLLVCN |
| | | TEMYYDGFHRSFCDTDDLETVH | | RACTGQQGKRFGLPFVLHLE |
| | | ESDCIFAFETPEIFRPEGILSQ | | KTIAWDLLQKEILEKMKYFL |
| | | RGIHLNNNLNHLKFGLDYHRLS | | RPTVCIQVCPFSLRVVSVVG |
| | | SPTQTAAKQGKMDSPTSRAGSD | | ITYLLPQEEQPLCHPIVE |
| | | KIVLLVCNRACTGQQGKRFGLP | | RALKSCGPGGTAHVKLVVEW |
| | | FVLHLEKTIAWDLLQKEILEKM | | DKETRDFLFVNTEDEYIPDA |
| | | KYFLRPTVCIQVCPFSLRVVSV | | ESVRLQRERHHQPQTCTLSQ |
| | | VGITYLLPQEEQPLCHPIVERA | | CFQLYTKEERLAPDDAWRCP |
| | | LKSCGPGGTAHVKLVVEWDKET | | HCKQLQQGSITLSLWTLPDV |
| | | RDFLFVNTEDEYIPDAESVRLQ | | LIIHLKRFRQEGDRRMKLQN |
| | | RERHHQPQTCTLSQ | | MVKFPLTGLDMTPHVVKRSQ |
| | | CFQLYTKEERLAPDDAWRCPHC | | SSWSLPSHWSPWRRPYGLGR |
| | | KQLQQGSITLSLWTLPDVLIIH | | DPEDYIYDLYAVCNHHGTMQ |
| | | LKRFRQEGDRRMKLQNMVKFPL | | GGHYTAYCKNSVDGLWYCFD |
| | | TGLDMTPHVVKRSQSSWSLPSH | | DSDVQQLSEDEVCTQTAYIL |
| | | WSPWRRPYGLGRDPEDYIYDLY | | FYQRRT |
| | | AVCNHHGTMQGGHYTAYCKNSV | | |
| | | DGLWYCFDDSDVQQLSEDEVCT | | |
| | | QTAYILFYQRRTAIPSWSANSS | | |
| | | VAGSTSSSLCEHWVSRLPGSKP | | |
| | | ASVTSAASSRRTSLASLSESVE | | |
| | | MTGERSEDDGGFSTRPFVRSVQ | | |
| | | RQSLSSRSSVTSPLAVNENCMR | | |
| | | PSWSLSAKLQMRSNSPSRFSGD | | |
| | | SPIHSSASTLEKIG | | |
| | | EAADDKVSISCFGSLRNLSSSY | | |
| | | QEPSDSHSRREHKAVGRAPLAV | | |
| | | MEGVFKDESDTRRLNSSVVDTQ | | |
| | | SKHSAQGDRLPPLSGPFDNNNQ | | |
| | | IAYVDQSDSVDSSPVKEVKAPS | | |
| | | HPGSLAKKPESTTKRSPSSKGT | | |
| | | SEPEKSLRKGRPALASQESSLS | | |
| | | STSPSSPLPVKVSLKPSRSRSK | | |
| | | ADSSSRGSGRHSSPAPAQPKKE | | |
| | | SSPKSQDSVSSPSPQKQKSASA | | |
| | | LTYTASSTSAKKASGPATRSPF | | |
| | | PPGKSRTSDHSLSREGSRQSLG | | |
| | | SDRASATSTSKPNSPRVSQARA | | |
| | | GEGRGAGKHVRSSS | | |
| | | MASLRSPSTSIKSGLKRDSKSE | | |
| | | DKGLSFFKSALRQKETRRSTDL | | |
| | | GKTALLSKKAGGSSVKSVCKNT | | |
| | | GDDEAERGHQPPASQQPNANTT | | |
| | | GKEQLVTKDPASAKHSLLSARK | | |
| | | SKSSQLDSGVPSSPGGRQSAEK | | |
| | | SSKKLSSSMQTSARPSQKPQ | | |
| U17LJ_HUMAN | 40 | MEEDSLYLGGEWQFNHESKLTS | 152 | AVGAGLQNMGNTCYVNASLQ |
| Ubiquitin | | SRPDAAFAEIQRTSLPEKSPLS | | CLTYTPPLANYMLSREHSQT |
| carboxyl- | | CETRVDLCDDLAPVARQLAPRE | | CHRHKGCMLCTMQAHITRAL |
| terminal | | KLPLSSRRPAAVGAGLQNMGNT | | HNPGHVIQPSQALAAGFHRG |
| hydrolase 17- | | CYVNASLQCLTYTPPLANYMLS | | KQEDAHEFLMFTVDAMKKAC |
| like protein 19 | | REHSQTCHRHKGCMLCTMQAHI | | LPGHKQVDHHSKDTTLIHQI |
| | | TRALHNPGHVIQPSQALAAGFH | | FGGYWRSQIKCLHCHGISDT |
| | | RGKQEDAHEFLMFTVDAMKKAC | | FDPYLDIALDIQAAQSVQQA |
| | | LPGHKQVDHHSKDTTLIHQIFG | | LEQLVKPEELNGENAYHCGV |
| | | GYWRSQIKCLHCHGISDTFDPY | | CLQRAPASKTLTLHTSAKVL |
| | | LDIALDIQAAQSVQQALEQLVK | | ILVLKRFSDVTGNKIAKNVQ |
| | | PEELNGENAYHCGVCLQRAPAS | | YPECLDMQPYMSQTNTGPLV |
| | | KTLTLHTSAKVLILVLKRFSDV | | YVLYAVLVHAGWSCHNGHYF |
| | | TGNKIAKNVQYPEC | | SYVKAQEGQWYKMDDAEVTA |
| | | LDMQPYMSQTNTGPLVYVLYAV | | SSITSVLSQQAYVLFYIQKS |
| | | LVHAGWSCHNGHYFSYVKAQEG | | EWERHSESVSRGREPRALGA |
| | | QWYKMDDAEVTASSITSVLSQQ | | EDTDRRATQGELKRDHPCLQ |
| | | AYVLFYIQKSEWERHSESVSRG | | APEL |
| | | REPRALGAEDTDRRATQGELKR | | |
| | | DHPCLQAPELDEHLVERATQES | | |
| | | TLDHWKFLQEQNKTKPEFNVRK | | |
| | | VEGTLPPDVLVIHQSKYKCGMK | | |
| | | NHHPEQQSSLLKLSSTTPTHQE | | |
| | | SMNTGTLASLRGRARRSKGKNK | | |
| | | HSKRALLVCQ | | |
| U17LF_HUMAN | 41 | MEDDSLYLGGEWQFNHESKLTS | 153 | AVGAGLQNMGNTCYVNASLQ |
| Ubiquitin | | SRPDAAFAEIQRTSLPEKSPLS | | CLTYTPPLANYMLSREHSQT |
| carboxyl- | | CETRVDLCDDLAPVARQLAPRE | | CHRHKGCMLCTMQAHITRAL |
| terminal | | KLPLSSRRPAAVGAGLQNMGNT | | HNPGHVIQPSQALAAGFHRG |
| hydrolase 17- | | CYVNASLQCLTYTPPLANYMLS | | KQEDAHEFLMFTVDAMKKAC |
| like protein 15 | | REHSQTCHRHKGCMLCTMQAHI | | LPGHKQVDHHSKDTTLIHQI |
| | | TRALHNPGHVIQPSQALAAGEH | | FGGYWRSQIKCLHCHGISDT |
| | | RGKQEDAHEFLMFTVDAMKKAC | | FDPYLDIALDIQAAQSVQQA |
| | | LPGHKQVDHHSKDTTLIHQIFG | | LEQLVKPEELNGENAYHCGV |
| | | GYWRSQIKCLHCHGISDTEDPY | | CLQRAPASKTLTLHTSAKVL |
| | | LDIALDIQAAQSVQQALEQLVK | | ILVLKRFSDVTGNKIDKNVQ |
| | | PEELNGENAYHCGVCLQRAPAS | | YPECLDMKLYMSQTNSGPLV |
| | | KTLTLHTSAKVLILVLKRESDV | | YVLYAVLVHAGWSCHNGHYF |
| | | TGNKIDKNVQYPEC | | SYVKAQEGQWYKMDDAEVTA |
| | | LDMKLYMSQTNSGPLVYVLYAV | | SSITSVLSQQAYVLFYIQKS |
| | | LVHAGWSCHNGHYFSYVKAQEG | | |
| | | QWYKMDDAEVTASSITSVLSQQ | | |
| | | AYVLFYIQKSEWERHSESVSRG | | |
| | | REPRALGAEDTDRRATQGELKR | | |
| | | DHPCLQAPELDEHLVERATQES | | |
| | | TLDHWKFLQEQNKTKPEFNVRK | | |
| | | VEGTLPPDVLVIHQSKYKCGMK | | |
| | | NHHPEQQSSLLNLSSTTPTHQE | | |
| | | SMNTGTLASLRGRARRSKGKNK | | |
| | | HSKRALLVCQWSQWKYRPTRRG | | |
| | | AHTHAHTQTHT | | |
| UBP47_HUMAN | 42 | MVPGEENQLVPKEDVEWRCRQN | 154 | ETGYVGLVNQAMTCYLNSLL |
| Ubiquitin | | IFDEMKKKFLQIENAAEEPRVL | | QTLEMTPEFRNALYKWEFEE |
| carboxyl- | | CIIQDTTNSKTVNERITLNLPA | | SEEDPVTSIPYQLQRLFVLL |
| terminal | | STPVRKLFEDVANKVGYINGTF | | QTSKKRAIETTDVTRSFGWD |
| hydrolase 47 | | DLVWGNGINTADMAPLDHTSDK | | SSEAWQQHDVQELCRVMEDA |
| | | SLLDANFEPGKKNFLHLTDKDG | | LEQKWKQTEQADLINELYQG |
| | | EQPQILLEDSSAGEDSVHDRFI | | KLKDYVRCLECGYEGWRIDT |
| | | GPLPREGSGGSTSDYVSQSYSY | | YLDIPLVIRPYGSSQAFASV |
| | | SSILNKSETGYVGLVNQAMTCY | | EEALHAFIQPEILDGPNQYF |
| | | LNSLLQTLFMTPEFRNALYKWE | | CERCKKKCDARKGLRFLHEP |
| | | FEESEEDPVTSIPYQLQRLFVL | | YLLTLQLKRFDFDYTTMHRI |
| | | LQTSKKRAIETTDVTRSFGWDS | | KLNDRMTFPEELDMSTFIDV |
| | | SEAWQQHDVQELCRVMEDALEQ | | EDEKSPQTESCTDSGAENEG |
| | | KWKQTEQADLINEL | | SCHSDQMSNDFSNDDGVDEG |
| | | YQGKLKDYVRCLECGYEGWRID | | ICLETNSGTEKISKSGLEKN |
| | | TYLDIPLVIRPYGSSQAFASVE | | SLIYELFSVMVHSGSAAGGH |
| | | EALHAFIQPEILDGPNQYFCER | | YYACIKSESDEQWYSENDQH |
| | | CKKKCDARKGLRFLHFPYLLTL | | VSRITQEDIKKTHGGSSGSR |
| | | QLKRFDEDYTTMHRIKLNDRMT | | GYYSSAFASSTNAYMLIYRL |
| | | FPEELDMSTFIDVEDEKSPQTE | | KD |
| | | SCTDSGAENEGSCHSDQMSNDE | | |
| | | SNDDGVDEGICLETNSGTEKIS | | |
| | | KSGLEKNSLIYELFSVMVHSGS | | |
| | | AAGGHYYACIKSESDEQWYSEN | | |
| | | DQHVSRITQEDIKKTHGGSSGS | | |
| | | RGYYSSAFASSTNAYMLIYRLK | | |
| | | DPARNAKFLEVDEYPEHIKNLV | | |
| | | QKERELEEQEKRQR | | |
| | | EIERNTCKIKLFCLHPTKQVMM | | |
| | | ENKLEVHKDKTLKEAVEMAYKM | | |
| | | MDLEEVIPLDCCRLVKYDEFHD | | |
| | | YLERSYEGEEDTPMGLLLGGVK | | |
| | | STYMEDLLLETRKPDQVFQSYK | | |
| | | PGEVMVKVHVVDLKAESVAAPI | | |
| | | TVRAYLNQTVTEFKQLISKAIH | | |
| | | LPAETMRIVLERCYNDLRLLSV | | |
| | | SSKTLKAEGFERSNKVFVESSE | | |
| | | TLDYQMAFADSHLWKLLDRHAN | | |
| | | TIRLFVLLPEQSPVSYSKRTAY | | |
| | | QKAGGDSGNVDDDCERVKGPVG | | |
| | | SLKSVEAILEESTEKLKSLSLQ | | |
| | | QQQDGDNGDSSKST | | |
| | | ETSDFENIESPLNERDSSASVD | | |
| | | NRELEQHIQTSDPENFQSEERS | | |
| | | DSDVNNDRSTSSVDSDILSSSH | | |
| | | SSDTLCNADNAQIPLANGLDSH | | |
| | | SITSSRRTKANEGKKETWDTAE | | |
| | | EDSGTDSEYDESGKSRGEMQYM | | |
| | | YFKAEPYAADEGSGEGHKWLMV | | |
| | | HVDKRITLAAFKQHLEPFVGVL | | |
| | | SSHFKVERVYASNQEFESVRLN | | |
| | | ETLSSFSDDNKITIRLGRALKK | | |
| | | GEYRVKVYQLLVNEQEPCKELL | | |
| | | DAVFAKGMTVRQSKEELIPQLR | | |
| | | EQCGLELSIDRERLRKKTWKNP | | |
| | | GTVELDYHIYEEDI | | |
| | | NISSNWEVELEVLDGVEKMKSM | | |
| | | SQLAVLSRRWKPSEMKLDPFQE | | |
| | | VVLESSSVDELREKLSEISGIP | | |
| | | LDDIEFAKGRGTFPCDISVLDI | | |
| | | HQDLDWNPKVSTLNVWPLYICD | | |
| | | DGAVIFYRDKTEELMELTDEQR | | |
| | | NELMKKESSRLQKTGHRVTYSP | | |
| | | RKEKALKIYLDGAPNKDLTQD | | |
| UBP51_HUMAN | 43 | MAQVRETSLPSGSGVRWISGGG | 155 | YTVGLRGLINLGNTCEMNCI |
| Ubiquitin | | GGASPEEAVEKAGKMEEAAAGA | | VQALTHIPLLKDFFLSDKHK |
| carboxyl- | | TKASSRREAEEMKLEPLQEREP | | CIMTSPSLCLVCEMSSLFHA |
| terminal | | APEENLTWSSSGGDEKVLPSIP | | MYSGSRTPHIPYKLLHLIWI |
| hydrolase 51 | | LRCHSSSSPVCPRRKPRPRPQP | | HAEHLAGYRQQDAHEFLIAI |
| | | RARSRSQPGLSAPPPPPARPPP | | LDVLHRHSKDDSGGQEANNP |
| | | PPPPPPPPAPRPRAWRGSRRRS | | NCCNCIIDQIFTGGLQSDVT |
| | | RPGSRPQTRRSCSGDLDGSGDP | | CQACHSVSTTIDPCWDISLD |
| | | GGLGDWLLEVEFGQGPTGCSHV | | LPGSCATFDSQNPERADSTV |
| | | ESFKVGKNWQKNLRLIYQREVW | | SRDDHIPGIPSLTDCLQWFT |
| | | SGTPETRKRKAKSCICHVCSTH | | RPEHLGSSAKIKCNSCQSYQ |
| | | MNRLHSCLSCVFFGCFTEKHIH | | ESTKQLTMKKLPIVACFHLK |
| | | KHAETKQHHLAVDLYHGVIYCF | | RFEHVGKQRRKINTFISFPL |
| | | MCKDYVYDKDIEQI | | ELDMTPFLASTKESRMKEGQ |
| | | AKETKEKILRLLTSTSTDVSHQ | | PPTDCVPNENKYSLFAVINH |
| | | QFMTSGFEDKQSTCETKEQEPK | | HGTLESGHYTSFIRQQKDQW |
| | | LVKPKKKRRKKSVYTVGLRGLI | | FSCDDAIITKATIEDLLYSE |
| | | NLGNTCFMNCIVQALTHIPLLK | | GYLLFYHKQG |
| | | DFFLSDKHKCIMTSPSLCLVCE | | |
| | | MSSLFHAMYSGSRTPHIPYKLL | | |
| | | HLIWIHAEHLAGYRQQDAHEFL | | |
| | | IAILDVLHRHSKDDSGGQEANN | | |
| | | PNCCNCIIDQIFTGGLQSDVTC | | |
| | | QACHSVSTTIDPCWDISLDLPG | | |
| | | SCATFDSQNPERADSTVSRDDH | | |
| | | IPGIPSLTDCLQWFTRPEHLGS | | |
| | | SAKIKCNSCQSYQESTKQLTMK | | |
| | | KLPIVACFHLKRFE | | |
| | | HVGKQRRKINTFISFPLELDMT | | |
| | | PFLASTKESRMKEGQPPTDCVP | | |
| | | NENKYSLFAVINHHGTLESGHY | | |
| | | TSFIRQQKDQWFSCDDAIITKA | | |
| | | TIEDLLYSEGYLLFYHKQGLEK | | |
| | | D | | |
| UBP36_HUMAN | 44 | MPIVDKLKEALKPGRKDSADDG | 156 | RVGAGLHNLGNTCELNATIQ |
| Ubiquitin | | ELGKLLASSAKKVLLQKIEFEP | | CLTYTPPLANYLLSKEHARS |
| carboxyl- | | ASKSFSYQLEALKSKYVLLNPK | | CHQGSFCMLCVMQNHIVQAF |
| terminal | | TEGASRHKSGDDPPARRQGSEH | | ANSGNAIKPVSFIRDLKKIA |
| hydrolase 36 | | TYESCGDGVPAPQKVLFPTERL | | RHFREGNQEDAHEFLRYTID |
| | | SLRWERVERVGAGLHNLGNTCF | | AMQKACLNGCAKLDRQTQAT |
| | | LNATIQCLTYTPPLANYLLSKE | | TLVHQIFGGYLRSRVKCSVC |
| | | HARSCHQGSFCMLCVMQNHIVQ | | KSVSDTYDPYLDVALEIRQA |
| | | AFANSGNAIKPVSFIRDLKKIA | | ANIVRALELFVKADVLSGEN |
| | | RHFREGNQEDAHEFLRYTIDAM | | AYMCAKCKKKVPASKRFTIH |
| | | QKACLNGCAKLDRQTQATTLVH | | RTSNVLTLSLKRFANFSGGK |
| | | QIFGGYLRSRVKCSVCKSVSDT | | ITKDVGYPEFLNIRPYMSQN |
| | | YDPYLDVALEIRQAANIVRALE | | NG |
| | | LFVKADVLSGENAY | | DPVMYGLYAVLVHSGYSCHA |
| | | MCAKCKKKVPASKRFTIHRTSN | | GHYYCYVKASNGQWYQMNDS |
| | | VLTLSLKRFANESGGKITKDVG | | LVHSSNVKVVLNQQAYVLFY |
| | | YPEFLNIRPYMSQNNGDPVMYG | | LRIP |
| | | LYAVLVHSGYSCHAGHYYCYVK | | |
| | | ASNGQWYQMNDSLVHSSNVKVV | | |
| | | LNQQAYVLFYLRIPGSKKSPEG | | |
| | | LISRTGSSSLPGRPSVIPDHSK | | |
| | | KNIGNGIISSPLTGKRQDSGTM | | |
| | | KKPHTTEEIGVPISRNGSTLGL | | |
| | | KSQNGCIPPKLPSGSPSPKLSQ | | |
| | | TPTHMPTILDDPGKKVKKPAPP | | |
| | | QHFSPRTAQGLPGTSNSNSSRS | | |
| | | GSQRQGSWDSRDVVLSTSPKLL | | |
| | | ATATANGHGLKGND | | |
| | | ESAGLDRRGSSSSSPEHSASSD | | |
| | | STKAPQTPRSGAAHLCDSQETN | | |
| | | CSTAGHSKTPPSGADSKTVKLK | | |
| | | SPVLSNTTTEPASTMSPPPAKK | | |
| | | LALSAKKASTLWRATGNDLRPP | | |
| | | PPSPSSDLTHPMKTSHPVVAST | | |
| | | WPVHRARAVSPAPQSSSRLQPP | | |
| | | FSPHPTLLSSTPKPPGTSEPRS | | |
| | | CSSISTALPQVNEDLVSLPHQL | | |
| | | PEASEPPQSPSEKRKKTFVGEP | | |
| | | QRLGSETRLPQHIREATAAPHG | | |
| | | KRKRKKKKRPEDTAASALQEGQ | | |
| | | TQRQPGSPMYRREGQAQLPAVR | | |
| | | RQEDGTQPQVNGQQ | | |
| | | VGCVTDGHHASSRKRRRKGAEG | | |
| | | LGEEGGLHQDPLRHSCSPMGDG | | |
| | | DPEAMEESPRKKKKKKRKQETQ | | |
| | | RAVEEDGHLKCPRSAKPQDAVV | | |
| | | PESSSCAPSANGWCPGDRMGLS | | |
| | | QAPPVSWNGERESDVVQELLKY | | |
| | | SSDKAYGRKVLTWDGKMSAVSQ | | |
| | | DAIEDSRQARTETVVDDWDEEF | | |
| | | DRGKEKKIKKEKREKRRNFNAF | | |
| | | QKLQTRRNEWSVTHPAKAASLS | | |
| | | YRR | | |
| UBP44_HUMAN | 45 | MLAMDTCKHVGQLQLAQDHSSL | 157 | TPGVTGLRNLGNTCYMNSVL |
| Ubiquitin | | NPQKWHCVDCNTTESIWACLSC | | QVLSHLLIFRQCFLKLDLNQ |
| carboxyl- | | SHVACGRYIEEHALKHFQESSH | | WLAMTASEKTRSCKHPPVTD |
| terminal | | PVALEVNEMYVFCYLCDDYVLN | | TVVYQMNECQEKDTGFVCSR |
| hydrolase 44 | | DNTTGDLKLLRRTLSAIKSQNY | | QSSLSSGLSGGASKGRKMEL |
| | | HCTTRSGRFLRSMGTGDDSYEL | | IQPKEPTSQYISLCHELHTL |
| | | HDGAQSLLQSEDQLYTALWHRR | | FQVMWSGKWALVSPFAMLHS |
| | | RILMGKIFRTWFEQSPIGRKKQ | | VWRLIPAFRGYAQQDAQEFL |
| | | EEPFQEKIVVKREVKKRRQELE | | CELLDKIQRELETTGTSLPA |
| | | YQVKAELESMPPRKSLRLQGLA | | LIPTSQRKLIKQVLNVVNNI |
| | | QSTIIEIVSVQVPAQTPASPAK | | FHGQLLSQVTCLACDNKSNT |
| | | DKVLSTSENEISQKVSDSSVKR | | IEPFWDLSLEFPERYQCSGK |
| | | RPIVTPGVTGLRNLGNTCYMNS | | DIASQPCLVTEMLAKFTETE |
| | | VLQVLSHLLIFRQC | | ALEGKIYVCDQCNSKRRRES |
| | | FLKLDLNQWLAMTASEKTRSCK | | SKPVVLTEAQKQLMICHLPQ |
| | | HPPVTDTVVYQMNECQEKDTGF | | VLRLHLKRFRWSGRNNREKI |
| | | VCSRQSSLSSGLSGGASKGRKM | | GVHVGFEEILNMEPYCCRET |
| | | ELIQPKEPTSQYISLCHELHTL | | LKSLRPECFIYDLSAVVMHH |
| | | FQVMWSGKWALVSPFAMLHSVW | | GKGFGSGHYTAYCYNSEGGF |
| | | RLIPAFRGYAQQDAQEFLCELL | | WVHCNDSKLSMCTMDEVCKA |
| | | DKIQRELETTGTSLPALIPTSQ | | QAYILFYTQRV |
| | | RKLIKQVLNVVNNIFHGQLLSQ | | |
| | | VTCLACDNKSNTIEPFWDLSLE | | |
| | | FPERYQCSGKDIASQPCLVTEM | | |
| | | LAKFTETEALEGKIYVCDQCNS | | |
| | | KRRRFSSKPVVLTEAQKQLMIC | | |
| | | HLPQVLRLHLKRFRWSGRNNRE | | |
| | | KIGVHVGFEEILNM | | |
| | | EPYCCRETLKSLRPECFIYDLS | | |
| | | AVVMHHGKGFGSGHYTAYCYNS | | |
| | | EGGFWVHCNDSKLSMCTMDEVC | | |
| | | KAQAYILFYTQRVTENGHSKLL | | |
| | | PPELLLGSQHPNEDADTSSNEI | | |
| | | LS | | |
| UBP8_HUMAN | 46 | MPAVASVPKELYLSSSLKDLNK | 158 | PALTGLRNLGNTCYMNSILQ |
| Ubiquitin | | KTEVKPEKISTKSYVHSALKIF | | CLCNAPHLADYENRNCYQDD |
| carboxyl- | | KTAEECRLDRDEERAYVLYMKY | | INRSNLLGHKGEVAEEFGII |
| terminal | | VTVYNLIKKRPDFKQQQDYFHS | | MKALWTGQYRYISPKDFKIT |
| hydrolase 8 | | ILGPGNIKKAVEEAERLSESLK | | IGKINDQFAGYSQQDSQELL |
| | | LRYEEAEVRKKLEEKDRQEEAQ | | LFLMDGLHEDLNKADNRKRY |
| | | RLQQKRQETGREDGGTLAKGSL | | KEENNDHLDDFKAAEHAWQK |
| | | ENVLDSKDKTQKSNGEKNEKCE | | HKQLNESIIVALFQGQFKST |
| | | TKEKGAITAKELYTMMTDKNIS | | VQCLTCHKKSRTFEAFMYLS |
| | | LIIMDARRMQDYQDSCILHSLS | | LPLASTSKCTLQDCLRLESK |
| | | VPEEAISPGVTASWIEAHLPDD | | EEKLTDNNRFYCSHCRARRD |
| | | SKDTWKKRGNVEYVVLLDWESS | | SLKKIEIWKLPPVLLVHLKR |
| | | AKDLQIGTTLRSLKDALFKWES | | FSYDGRWKQKLQTSVDEPLE |
| | | KTVLRNEPLVLEGG | | NLDLSQYVIGPKNNLKKYNL |
| | | YENWLLCYPQYTTNAKVTPPPR | | FSVSNHYGGLDGGHYTAYCK |
| | | RQNEEVSISLDFTYPSLEESIP | | NAARQRWFKEDDHEVSDISV |
| | | SKPAAQTPPASIEVDENIELIS | | SSVKSSAAYILFYTSLG |
| | | GQNERMGPLNISTPVEPVAASK | | |
| | | SDVSPIIQPVPSIKNVPQIDRT | | |
| | | KKPAVKLPEEHRIKSESTNHEQ | | |
| | | QSPQSGKVIPDRSTKPVVESPT | | |
| | | LMLTDEEKARIHAETALLMEKN | | |
| | | KQEKELRERQQEEQKEKLRKEE | | |
| | | QEQKAKKKQEAEENEITEKQQK | | |
| | | AKEEMEKKESEQAKKEDKETSA | | |
| | | KRGKEITGVKRQSKSEHETSDA | | |
| | | KKSVEDRGKRCPTPEIQKKSTG | | |
| | | DVPHTSVTGDSGSG | | |
| | | KPFKIKGQPESGILRTGTFRED | | |
| | | TDDTERNKAQREPLTRARSEEM | | |
| | | GRIVPGLPSGWAKFLDPITGTF | | |
| | | RYYHSPTNTVHMYPPEMAPSSA | | |
| | | PPSTPPTHKAKPQIPAERDREP | | |
| | | SKLKRSYSSPDITQAIQEEEKR | | |
| | | KPTVTPTVNRENKPTCYPKAEI | | |
| | | SRLSASQIRNLNPVEGGSGPAL | | |
| | | TGLRNLGNTCYMNSILQCLCNA | | |
| | | PHLADYFNRNCYQDDINRSNLL | | |
| | | GHKGEVAEEFGIIMKALWTGQY | | |
| | | RYISPKDFKITIGKINDQFAGY | | |
| | | SQQDSQELLLFLMDGLHEDLNK | | |
| | | ADNRKRYKEENNDH | | |
| | | LDDEKAAEHAWQKHKQLNESII | | |
| | | VALFQGQFKSTVQCLTCHKKSR | | |
| | | TFEAFMYLSLPLASTSKCTLQD | | |
| | | CLRLFSKEEKLTDNNRFYCSHC | | |
| | | RARRDSLKKIEIWKLPPVLLVH | | |
| | | LKRFSYDGRWKQKLQTSVDFPL | | |
| | | ENLDLSQYVIGPKNNLKKYNLF | | |
| | | SVSNHYGGLDGGHYTAYCKNAA | | |
| | | RQRWFKEDDHEVSDISVSSVKS | | |
| | | SAAYILFYTSLGPRVTDVAT | | |
| UBP37_HUMAN | 47 | MSPLKIHGPIRIRSMQTGITKW | 159 | QQLQGFSNLGNTCYMNAILQ |
| Ubiquitin | | KEGSFEIVEKENKVSLVVHYNT | | SLFSLQSFANDLLKQGIPWK |
| carboxyl- | | GGIPRIFQLSHNIKNVVLRPSG | | KIPLNALIRRFAHLLVKKDI |
| terminal | | AKQSRLMLTLQDNSFLSIDKVP | | CNSETKKDLLKKVKNAISAT |
| hydrolase 37 | | SKDAEEMRLFLDAVHQNRLPAA | | AERFSGYMQNDAHEFLSQCL |
| | | MKPSQGSGSFGAILGSRTSQKE | | DQLKEDMEKLNKTWKTEPVS |
| | | TSRQLSYSDNQASAKRGSLETK | | GEENSPDISATRAYTCPVIT |
| | | DDIPFRKVLGNPGRGSIKTVAG | | NLEFEVQHSIICKACGEIIP |
| | | SGIARTIPSLISTSTPLRSGLL | | KREQFNDLSIDLPRRKKPLP |
| | | ENRTEKRKRMISTGSELNEDYP | | PRSIQDSLDLFFRAEELEYS |
| | | KENDSSSNNKAMTDPSRKYLTS | | CEKCGGKCALVRHKENRLPR |
| | | SREKQLSLKQSEENRTSGLLPL | | VLILHLKRYSENVALSLNNK |
| | | QSSSFYGSRAGSKEHSSGGTNL | | IGQQVIIPRYLTLSSHCTEN |
| | | DRTNVSSQTPSAKR | | TKP |
| | | SLGFLPQPVPLSVKKLRCNQDY | | PFTLGWSAHMAISRPLKASQ |
| | | TGWNKPRVPLSSHQQQQLQGES | | MVNSCITSPSTPSKKFTEKS |
| | | NLGNTCYMNAILQSLFSLQSFA | | KSSLALCLDSDSEDELKRSV |
| | | NDLLKQGIPWKKIPLNALIRRE | | ALSQRLCEMLGNEQQQEDLE |
| | | AHLLVKKDICNSETKKDLLKKV | | KDSKLCPIEPDKSELENSGE |
| | | KNAISATAERFSGYMQNDAHEF | | DRMSEEELLAAVLEISKRDA |
| | | LSQCLDQLKEDMEKLNKTWKTE | | SPSLSHEDDDKPTSSPDTGE |
| | | PVSGEENSPDISATRAYTCPVI | | AEDDIQEMPENPDTMETEKP |
| | | TNLEFEVQHSIICKACGEIIPK | | KTITELDPASFTEITKDCDE |
| | | REQENDLSIDLPRRKKPLPPRS | | NKENKTPEGSQGEVDWLQQY |
| | | IQDSLDLFFRAEELEYSCEKCG | | DMEREREEQELQQALAQSLQ |
| | | GKCALVRHKENRLPRVLILHLK | | EQEAWEQKEDDDLKRATELS |
| | | RYSFNVALSLNNKIGQQVIIPR | | LQEENNSFVDALGSDEDSGN |
| | | YLTLSSHCTENTKP | | EDVEDMEYTEAEAEELKRNA |
| | | PFTLGWSAHMAISRPLKASQMV | | ETGNLPHSYRLISVVSHIGS |
| | | NSCITSPSTPSKKFTFKSKSSL | | TSSSGHYISDVYDIKKQAWF |
| | | ALCLDSDSEDELKRSVALSQRL | | TYNDLEVSKIQEAAVQSDRD |
| | | CEMLGNEQQQEDLEKDSKLCPI | | RSGYIFFYMHK |
| | | EPDKSELENSGEDRMSEEELLA | | |
| | | AVLEISKRDASPSLSHEDDDKP | | |
| | | TSSPDTGFAEDDIQEMPENPDT | | |
| | | METEKPKTITELDPASFTEITK | | |
| | | DCDENKENKTPEGSQGEVDWLQ | | |
| | | QYDMEREREEQELQQALAQSLQ | | |
| | | EQEAWEQKEDDDLKRATELSLQ | | |
| | | EFNNSFVDALGSDEDSGNEDVE | | |
| | | DMEYTEAEAEELKRNAETGNLP | | |
| | | HSYRLISVVSHIGS | | |
| | | TSSSGHYISDVYDIKKQAWFTY | | |
| | | NDLEVSKIQEAAVQSDRDRSGY | | |
| | | IFFYMHKEIFDELLETEKNSQS | | |
| | | LSTEVGKTTRQAL | | |
| U17LD_HUMAN | 48 | MEEDSLYLGGEWQFNHESKLTS | 160 | AVGAGLQNMGNTCYVNASLQ |
| Ubiquitin | | SRLDAAFAEIQRTSLPEKSPLS | | CLTYTPPLANYMLSREHSQT |
| carboxyl- | | CETRVDLCDDLVPEARQLAPRE | | CHRHKGCMLCTMQAHITRAL |
| terminal | | KLPLSSRRPAAVGAGLQNMGNT | | HNPGHVIQPSQALAAGFHRG |
| hydrolase 17- | | CYVNASLQCLTYTPPLANYMLS | | KQEDAHEFLMFTVDAMKKAC |
| like protein 13 | | REHSQTCHRHKGCMLCTMQAHI | | LPGHKQVDHPSKDTTLIHQI |
| | | TRALHNPGHVIQPSQALAAGFH | | FGGYWRSQIKCLHCHGISDT |
| | | RGKQEDAHEFLMFTVDAMKKAC | | FDPYLDIALDIQAAQSVQQA |
| | | LPGHKQVDHPSKDTTLIHQIFG | | LEQLVKPEELNGENAYHCGV |
| | | GYWRSQIKCLHCHGISDTFDPY | | CLQRAPASKTLTLHTSAKVL |
| | | LDIALDIQAAQSVQQALEQLVK | | ILVLKRFSDVTGNKIAKNVQ |
| | | PEELNGENAYHCGVCLQRAPAS | | YPECLDMQPYMSQQNTGPLV |
| | | KTLTLHTSAKVLILVLKRFSDV | | YVLYAVLVHAGWSCHNGHYF |
| | | TGNKIAKNVQYPEC | | SYVKAQEGQWYKMDDAEVTA |
| | | LDMQPYMSQQNTGPLVYVLYAV | | ASITSVLSQQAYVLFYIQKS |
| | | LVHAGWSCHNGHYFSYVKAQEG | | |
| | | QWYKMDDAEVTAASITSVLSQQ | | |
| | | AYVLFYIQKSEWERHSESVSRG | | |
| | | REPRALGAEDTDRRATQGELKR | | |
| | | DHPCLQAPELDEHLVERATQES | | |
| | | TLDRWKFLQEQNKTKPEFNVRK | | |
| | | VEGTLPPDVLVIHQSKYKCGMK | | |
| | | NHHPEQQSSLLNLSSSTPTHQE | | |
| | | SMNTGTLASLRGRARRSKGKNK | | |
| | | HSKRALLVCQ | | |
| U17L3_HUMAN | 49 | MGDDSLYLGGEWQFNHFSKLTS | 161 | AVGAGLQNMGNTCYENASLQ |
| Ubiquitin | | SRPDAAFAEIQRTSLPEKSPLS | | CLTYTLPLANYMLSREHSQT |
| carboxyl- | | SETRVDLCDDLAPVARQLAPRE | | CQRPKCCMLCTMQAHITWAL |
| terminal | | KLPLSSRRPAAVGAGLQNMGNT | | HSPGHVIQPSQALASGFHRG |
| hydrolase 17- | | CYENASLQCLTYTLPLANYMLS | | KQEDVHEFLMFTVDAMKKAC |
| like protein 3 | | REHSQTCQRPKCCMLCTMQAHI | | LPGHKQVDHHSKDTTLIHQI |
| | | TWALHSPGHVIQPSQALASGFH | | FGGCWRSQIKCLHCHGISDT |
| | | RGKQEDVHEFLMFTVDAMKKAC | | FDPYLDIALDIQAAQSVKQA |
| | | LPGHKQVDHHSKDTTLIHQIFG | | LEQLVKPEELNGENAYHCGL |
| | | GCWRSQIKCLHCHGISDTEDPY | | CLQRAPASNTLTLHTSAKVL |
| | | LDIALDIQAAQSVKQALEQLVK | | ILVLKRESDVAGNKLAKNVQ |
| | | PEELNGENAYHCGLCLQRAPAS | | YPECLDMQPYMSQQNTGPLV |
| | | NTLTLHTSAKVLILVLKRFSDV | | YVLYAVLVHAGWSCHDGHYF |
| | | AGNKLAKNVQYPEC | | SYVKAQEGQWYKMDDAEVTV |
| | | LDMQPYMSQQNTGPLVYVLYAV | | CSITSVLSQQAYVLFYIQKS |
| | | LVHAGWSCHDGHYFSYVKAQEG | | |
| | | QWYKMDDAEVTVCSITSVLSQQ | | |
| | | AYVLFYIQKSEWERHSESVSRG | | |
| | | REPRALGAEDTDRRAKQGELKR | | |
| | | DHPCLQAPELDEHLVERATQES | | |
| | | TLDHWKFLQEQNKTKPEFNVGK | | |
| | | VEGTLPPNALVIHQSKYKCGMK | | |
| | | NHHPEQQSSLLNLSSTTRTDQE | | |
| | | SMNTGTLASLQGRTRRAKGKNK | | |
| | | HSKRALLVCQ | | |
| UBP54_HUMAN | 50 | MSWKRNYFSGGRGSVQGMFAPR | 162 | APSKGLSNEPGQNSCFLNSA |
| Inactive | | SSTSIAPSKGLSNEPGQNSCEL | | LQVLWHLDIFRRSFRQLTTH |
| ubiquitin | | NSALQVLWHLDIFRRSFRQLTT | | KCMGDSCIFCALKGIFNQFQ |
| carboxyl- | | HKCMGDSCIFCALKGIFNQFQC | | CSSEKVLPSDTLRSALAKTF |
| terminal | | SSEKVLPSDTLRSALAKTFQDE | | QDEQRFQLGIMDDAAECFEN |
| hydrolase 54 | | QRFQLGIMDDAAECFENLLMRI | | LLMRIHFHIADETKEDICTA |
| | | HFHIADETKEDICTAQHCISHQ | | QHCISHQKFAMTLFEQCVCT |
| | | KFAMTLFEQCVCTSCGATSDPL | | SCGATSDPLPFIQ |
| | | PFIQMVHYISTTSLCNQAICML | | MVHYISTTSLCNQAICMLER |
| | | ERREKPSPSMFGELLQNASTMG | | REKPSPSMFGELLQNASTMG |
| | | DLRNCPSNCGERIRIRRVLMNA | | DLRNCPSNCGERIRIRRVLM |
| | | PQIITIGLVWDSDHSDLAEDVI | | NAPQIITIGLVWDSDHSDLA |
| | | HSLGTCLKLGDLFFRVTDDRAK | | EDVIHSLGTCLKLGDLFFRV |
| | | QSELYLVGMICYYG | | TDDRAKQSELYLVGMICYYG |
| | | KHYSTFFFQTKIRKWMYEDDAH | | KHYSTFFFQTKIRKWMYFDD |
| | | VKEIGPKWKDVVTKCIKGHYQP | | AHVKEIGPKWKDVVTKCIKG |
| | | LLLLYADPQGTPVSTQDLPPQA | | HYQPLLLLYADPQGTPVSTQ |
| | | EFQSYSRTCYDSEDSGREPSIS | | DLPPQAEFQSYSRTCYDSED |
| | | SDTRTDSSTESYPYKHSHHESV | | SGREPSISSDTRTDSSTESY |
| | | VSHFSSDSQGTVIYNVENDSMS | | PYKHSHHESVVSHFSSDSQG |
| | | QSSRDTGHLTDSECNQKHTSKK | | TVIYNVEND |
| | | GSLIERKRSSGRVRRKGDEPQA | | |
| | | SGYHSEGETLKEKQAPRNASKP | | |
| | | SSSTNRLRDFKETVSNMIHNRP | | |
| | | SLASQTNVGSHCRGRGGDQPDK | | |
| | | KPPRTLPLHSRDWEIESTSSES | | |
| | | KSSSSSKYRPTWRPKRESLNID | | |
| | | SIFSKDKRKHCGYT | | |
| | | QLSPFSEDSAKEFIPDEPSKPP | | |
| | | SYDIKFGGPSPQYKRWGPARPG | | |
| | | SHLLEQHPRLIQRMESGYESSE | | |
| | | RNSSSPVSLDAALPESSNVYRD | | |
| | | PSAKRSAGLVPSWRHIPKSHSS | | |
| | | SILEVDSTASMGGWTKSQPFSG | | |
| | | EEISSKSELDELQEEVARRAQE | | |
| | | QELRRKREKELEAAKGENPHPS | | |
| | | REMDLDELQNQGRSDGFERSLQ | | |
| | | EAESVFEESLHLEQKGDCAAAL | | |
| | | ALCNEAISKLRLALHGASCSTH | | |
| | | SRALVDKKLQISIRKARSLQDR | | |
| | | MQQQQSPQQPSQPSACLPTQAG | | |
| | | TLSQPTSEQPIPLQ | | |
| | | VLLSQEAQLESGMDTEFGASSE | | |
| | | FHSPASCHESHSSLSPESSAPQ | | |
| | | HSSPSRSALKLLTSVEVDNIEP | | |
| | | SAFHRQGLPKAPGWTEKNSHHS | | |
| | | WEPLDAPEGKLQGSRCDNSSCS | | |
| | | KLPPQEGRGIAQEQLFQEKKDP | | |
| | | ANPSPVMPGIATSERGDEHSLG | | |
| | | CSPSNSSAQPSLPLYRTCHPIM | | |
| | | PVASSFVLHCPDPVQKTNQCLQ | | |
| | | GQSLKTSLTLKVDRGSEETYRP | | |
| | | EFPSTKGLVRSLAEQFQRMQGV | | |
| | | SMRDSTGFKDRSLSGSLRKNSS | | |
| | | PSDSKPPFSQGQEKGHWPWAKQ | | |
| | | QSSLEGGDRPLSWE | | |
| | | ESTEHSSLALNSGLPNGETSSG | | |
| | | GQPRLAEPDIYQEKLSQVRDVR | | |
| | | SKDLGSSTDLGTSLPLDSWVNI | | |
| | | TRFCDSQLKHGAPRPGMKSSPH | | |
| | | DSHTCVTYPERNHILLHPHWNQ | | |
| | | DTEQETSELESLYQASLQASQA | | |
| | | GCSGWGQQDTAWHPLSQTGSAD | | |
| | | GMGRRLHSAHDPGLSKTSTAEM | | |
| | | EHGLHEARTVRTSQATPCRGLS | | |
| | | RECGEDEQYSAENLRRISRSLS | | |
| | | GTVVSEREEAPVSSHSFDSSNV | | |
| | | RKPLETGHRCSSSSSLPVIHDP | | |
| | | SVFLLGPQLYLPQPQFLSPDVL | | |
| | | MPTMAGEPNRLPGT | | |
| | | SRSVQQFLAMCDRGETSQGAKY | | |
| | | TGRTLNYQSLPHRSRTDNSWAP | | |
| | | WSETNQHIGTRELTTPGCNPQL | | |
| | | TYTATLPERSKGLQVPHTQSWS | | |
| | | DLFHSPSHPPIVHPVYPPSSSL | | |
| | | HVPLRSAWNSDPVPGSRTPGPR | | |
| | | RVDMPPDDDWRQSSYASHSGHR | | |
| | | RTVGEGFLFVLSDAPRREQIRA | | |
| | | RVLQHSQW | | |
| SNUT2_HUMAN | 51 | MSGRSKRESRGSTRGKRESESR | 163 | LPGIVGLNNIKANDYANAVL |
| U4/U6.U5 | | GSSGRVKRERDREREPEAASSR | | QALSNVPPLRNYFLEEDNYK |
| tri-snRNP- | | GSPVRVKREFEPASAREAPASV | | NIKRPPGDIMELLVQRFGEL |
| associated | | VPFVRVKREREVDEDSEPEREV | | MRKLWNPRNFKAHVSPHEML |
| protein 2 | | RAKNGRVDSEDRRSRHCPYLDT | | QAVVLCSKKTFQITKQGDGV |
| | | INRSVLDEDFEKLCSISLSHIN | | DFLSWFLNALHSALGGTKKK |
| | | AYACLVCGKYFQGRGLKSHAYI | | KKTIVTDVFQGSMRIFTKKL |
| | | HSVQFSHHVELNLHTLKFYCLP | | PHPDLPAEEKEQLLHNDEYQ |
| | | DNYEIIDSSLEDITYVLKPTFT | | ETMVESTFMYLTLDLPTAPL |
| | | KQQIANLDKQAKLSRAYDGTTY | | YKDEKEQLIIPQVPLENILA |
| | | LPGIVGLNNIKANDYANAVLQA | | KENGITEKEYKTYKENFLKR |
| | | LSNVPPLRNYFLEEDNYKNIKR | | FQLTKLPPYLIFCIKRFTKN |
| | | PPGDIMFLLVQRFGELMRKLWN | | NFFVEKNPTIVNFPITNVDL |
| | | PRNFKAHVSPHEML | | REYLSEEVQAVHKNTTYDLI |
| | | QAVVLCSKKTFQITKQGDGVDE | | ANIVHDGKPSEGSYRIHVLH |
| | | LSWFLNALHSALGGTKKKKKTI | | HGTGKWYELQDLQVTDILPQ |
| | | VTDVFQGSMRIFTKKLPHPDLP | | MITLSEAYIQIWKRRD |
| | | AEEKEQLLHNDEYQETMVESTE | | |
| | | MYLTLDLPTAPLYKDEKEQLII | | |
| | | PQVPLENILAKENGITEKEYKT | | |
| | | YKENFLKRFQLTKLPPYLIFCI | | |
| | | KRFTKNNFFVEKNPTIVNEPIT | | |
| | | NVDLREYLSEEVQAVHKNTTYD | | |
| | | LIANIVHDGKPSEGSYRIHVLH | | |
| | | HGTGKWYELQDLQVTDILPQMI | | |
| | | TLSEAYIQIWKRRDNDETNQQG | | |
| | | A | | |
| UBP35_HUMAN | 52 | MDKILEAVVTSSYPVSVKQGLV | 164 | SDTGKIGLINLGNTCYVNSI |
| Ubiquitin | | RRVLEAARQPLEREQCLALLAL | | LQALFMASDERHCVLRLTEN |
| carboxyl- | | GARLYVGGAEELPRRVGCQLLH | | NSQPLMTKLQWLFGFLEHSQ |
| terminal | | VAGRHHPDVFAEFFSARRVLRL | | RPAISPENELSASWTPWESP |
| hydrolase 35 | | LQGGAGPPGPRALACVQLGLQL | | GTQQDCSEYLKYLLDRLHEE |
| | | LPEGPAADEVFALLRREVLRTV | | EKTGTRICQKLKQSSSPSPP |
| | | CERPGPAACAQVARLLARHPRC | | EEPPAPSSTSVEKMEGGKIV |
| | | VPDGPHRLLFCQQLVRCLGRER | | TRICCLCCLNVSSREEAFTD |
| | | CPAEGEEGAVEFLEQAQQVSGL | | LSLAFPPPERCRRRRLGSVM |
| | | LAQLWRAQPAAILPCLKELFAV | | RPTEDITARELPPPTSAQGP |
| | | ISCAEEEPPSSALASVVQHLPL | | GRVGPRRQRKHCITEDTPPT |
| | | ELMDGVVRNLSNDDSVTDSQML | | SLYIEGLDSKEAGGQSSQEE |
| | | TAISRMIDWVSWPLGKNIDKWI | | RIEREEEGKEERTEKEEVGE |
| | | IALLKGLAAVKKES | | EEESTRGEGEREKEEEVEEE |
| | | ILIEVSLTKIEKVESKLLYPIV | | EEKVE |
| | | RGAALSVLKYMLLTFQHSHEAF | | KETEKEAEQEKEEDSLGAGT |
| | | HLLLPHIPPMVASLVKEDSNSG | | HPDAAIPSGERTCGSEGSRS |
| | | TSCLEQLAELVHCMVFRFPGEP | | VLDLVNYFLSPEKLTAENRY |
| | | DLYEPVMEAIKDLHVPNEDRIK | | YCESCASLQDAEKVVELSQG |
| | | QLLGQDAWTSQKSELAGFYPRL | | PCYLILTLLRESFDLRTMRR |
| | | MAKSDTGKIGLINLGNTCYVNS | | RKILDDVSIPLLLRLPLAGG |
| | | ILQALFMASDERHCVLRLTENN | | RGQAYDLCSVVVHSGVSSES |
| | | SQPLMTKLQWLFGFLEHSQRPA | | GHYYCYAREGAARPAASLGT |
| | | ISPENFLSASWTPWFSPGTQQD | | ADRPEPENQWYLENDTRVSE |
| | | CSEYLKYLLDRLHEEEKTGTRI | | SSFESVSNVTSFFPKDTAYV |
| | | CQKLKQSSSPSPPEEPPAPSST | | LFYRQRP |
| | | SVEKMFGGKIVTRICCLCCLNV | | |
| | | SSREEAFTDLSLAF | | |
| | | PPPERCRRRRLGSVMRPTEDIT | | |
| | | ARELPPPTSAQGPGRVGPRRQR | | |
| | | KHCITEDTPPTSLYIEGLDSKE | | |
| | | AGGQSSQEERIEREEEGKEERT | | |
| | | EKEEVGEEEESTRGEGEREKEE | | |
| | | EVEEEEEKVEKETEKEAEQEKE | | |
| | | EDSLGAGTHPDAAIPSGERTCG | | |
| | | SEGSRSVLDLVNYFLSPEKLTA | | |
| | | ENRYYCESCASLQDAEKVVELS | | |
| | | QGPCYLILTLLRFSFDLRTMRR | | |
| | | RKILDDVSIPLLLRLPLAGGRG | | |
| | | QAYDLCSVVVHSGVSSESGHYY | | |
| | | CYAREGAARPAASLGTADRPEP | | |
| | | ENQWYLENDTRVSE | | |
| | | SSFESVSNVTSFFPKDTAYVLF | | |
| | | YRQRPREGPEAELGSSRVRTEP | | |
| | | TLHKDLMEAISKDNILYLQEQE | | |
| | | KEARSRAAYISALPTSPHWGRG | | |
| | | FDEDKDEDEGSPGGCNPAGGNG | | |
| | | GDFHRLVE | | |
| UBP15_HUMAN | 53 | MAEGGAADLDTQRSDIATLLKT | 165 | EQPGLCGLSNLGNTCEMNSA |
| Ubiquitin | | SLRKGDTWYLVDSRWFKQWKKY | | IQCLSNTPPLTEYELNDKYQ |
| carboxyl- | | VGFDSWDKYQMGDQNVYPGPID | | EELNFDNPLGMRGEIAKSYA |
| terminal | | NSGLLKDGDAQSLKEHLIDELD | | ELIKQMWSGKFSYVTPRAFK |
| hydrolase 15 | | YILLPTEGWNKLVSWYTLMEGQ | | TQVGRFAPQFSGYQQQDCQE |
| | | EPIARKVVEQGMFVKHCKVEVY | | LLAFLLDGLHEDLNRIRKKP |
| | | LTELKLCENGNMNNVVTRRESK | | YIQLKDADGRPDKVVAEEAW |
| | | ADTIDTIEKEIRKIFSIPDEKE | | ENHLKRNDSIIVDIFHGLFK |
| | | TRLWNKYMSNTFEPLNKPDSTI | | STLVCPECAKISVTFDPFCY |
| | | QDAGLYQGQVLVIEQKNEDGTW | | LTLPLPMKKERTLEVYLVRM |
| | | PRGPSTPKSPGASNESTLPKIS | | DPLTKPMQYKVVVPKIGNIL |
| | | PSSLSNNYNNMNNRNVKNSNYC | | DLCTALSALSGIPADKMIVT |
| | | LPSYTAYKNYDYSEPGRNNEQP | | DIYNHRFHRIFAMDENLSSI |
| | | GLCGLSNLGNTCEM | | MERDDIYVFEININRTEDTE |
| | | NSAIQCLSNTPPLTEYELNDKY | | HVIIPVCLREKFRHSSYTHH |
| | | QEELNFDNPLGMRGEIAKSYAE | | TGSSLFGQPFLMAVPRNNTE |
| | | LIKQMWSGKFSYVTPRAFKTQV | | DKLYNLLLLRMCRYVKISTE |
| | | GRFAPQFSGYQQQDCQELLAFL | | TEETEGSLHCCKDQNINGNG |
| | | LDGLHEDLNRIRKKPYIQLKDA | | PNGIHEEGSPSEMETDEPDD |
| | | DGRPDKVVAEEAWENHLKRNDS | | ESSQDQELPSENENSQSEDS |
| | | IIVDIFHGLFKSTLVCPECAKI | | VGGDNDSENGLCTEDTCKGQ |
| | | SVTFDPFCYLTLPLPMKKERTL | | LTGHKKRLFTFQFNNLGNTD |
| | | EVYLVRMDPLTKPMQYKVVVPK | | INYIKDDTRHIREDDRQLRL |
| | | IGNILDLCTALSALSGIPADKM | | DERSFLALDWDPDLKKRYED |
| | | IVTDIYNHRFHRIFAMDENLSS | | ENAAEDFEKHESVEYKPPKK |
| | | IMERDDIYVFEININRTEDTEH | | PFVKLKDCIELFTTKEKLGA |
| | | VIIPVCLREKFRHSSYTHHTGS | | EDPWYCPNCKEHQQATKKLD |
| | | SLFGQPFLMAVPRN | | LWSLPPVLVVHLKRESYSRY |
| | | NTEDKLYNLLLLRMCRYVKIST | | MRDKLDTLVDFPINDLDMSE |
| | | ETEETEGSLHCCKDQNINGNGP | | FLINPNAGPCRYNLIAVSNH |
| | | NGIHEEGSPSEMETDEPDDESS | | YGGMGGGHYTAFAKNKDDGK |
| | | QDQELPSENENSQSEDSVGGDN | | WYYFDDSSVSTASEDQIVSK |
| | | DSENGLCTEDTCKGQLTGHKKR | | AAYVLFYQRQD |
| | | LFTFQFNNLGNTDINYIKDDTR | | |
| | | HIREDDRQLRLDERSFLALDWD | | |
| | | PDLKKRYFDENAAEDFEKHESV | | |
| | | EYKPPKKPFVKLKDCIELFTTK | | |
| | | EKLGAEDPWYCPNCKEHQQATK | | |
| | | KLDLWSLPPVLVVHLKRESYSR | | |
| | | YMRDKLDTLVDFPINDLDMSEF | | |
| | | LINPNAGPCRYNLIAVSNHYGG | | |
| | | MGGGHYTAFAKNKD | | |
| | | DGKWYYFDDSSVSTASEDQIVS | | |
| | | KAAYVLFYQRQDTFSGTGFFPL | | |
| | | DRETKGASAATGIPLESDEDSN | | |
| | | DNDNDIENENCMHTN | | |
| UBP29_HUMAN | 54 | MISLKVCGFIQIWSQKTGMTKL | 166 | QLQQGFPNLGNTCYMNAVLQ |
| Ubiquitin | | KEALIETVQRQKEIKLVVTEKS | | SLFAIPSFADDLLTQGVPWE |
| carboxyl- | | GKFIRIFQLSNNIRSVVLRHCK | | YIPFEALIMTLTQLLALKDE |
| terminal | | KRQSHLRLTLKNNVELFIDKLS | | CSTKIKRELLGNVKKVISAV |
| hydrolase 29 | | YRDAKQLNMELDIIHQNKSQQP | | AEIFSGNMQNDAHEFLGQCL |
| | | MKSDDDWSVFESRNMLKEIDKT | | DQLKEDMEKLNATLNTGKEC |
| | | SFYSICNKPSYQKMPLFMSKSP | | GDENSSPQMHVGSAATKVEV |
| | | THVKKGILENQGGKGQNTLSSD | | CPVVANFEFELQLSLICKAC |
| | | VQTNEDILKEDNPVPNKKYKTD | | GHAVLKVEPNNYLSINLHQE |
| | | SLKYIQSNRKNPSSLEDLEKDR | | TKPLPLSIQNSLDLFFKEEE |
| | | DLKLGPSENTNCNGNPNLDETV | | LEYNCQMCKQKSCVARHTES |
| | | LATQTLNAKNGLTSPLEPEHSQ | | RLSRVLIIHLKRYSENNAWL |
| | | GDPRCNKAQVPLDSHSQQLQQG | | LVKNNEQVYIPKSLSLSSYC |
| | | FPNLGNTCYMNAVL | | NESTKPPLPLSSSAPVGKCE |
| | | QSLFAIPSFADDLLTQGVPWEY | | VLEVSQEMISEINSPLTPSM |
| | | IPFEALIMTLTQLLALKDECST | | KLTSESSDSLVLPVEPDKNA |
| | | KIKRELLGNVKKVISAVAEIFS | | DLQRFQRDCGDASQEQHQRD |
| | | GNMQNDAHEFLGQCLDQLKEDM | | LENGSALESELVHERDRAIG |
| | | EKLNATLNTGKECGDENSSPQM | | EKELPVADSLMDQGDISLPV |
| | | HVGSAATKVFVCPVVANFEFEL | | MYEDGGKLISSPDTRLVEVH |
| | | QLSLICKACGHAVLKVEPNNYL | | LQEVPQHPELQKYEKTNTFV |
| | | SINLHQETKPLPLSIQNSLDLF | | EFNFDSVTESTNGFYDCKEN |
| | | FKEEELEYNCQMCKQKSCVARH | | RIPEGSQGMAEQLQQCIEES |
| | | TFSRLSRVLIIHLKRYSENNAW | | IIDEFLQQAPPPGVRKLDAQ |
| | | LLVKNNEQVYIPKSLSLSSYCN | | EHTEETLNQSTELRLQKADL |
| | | ESTKPPLPLSSSAPVGKCEVLE | | NHLGALGSDNPGNKNILDAE |
| | | VSQEMISEINSPLTPSMKLTSE | | NTRGEAKELTRNVKMGDPLQ |
| | | SSDSLVLPVEPDKN | | AYRLISVVSHIGSSPNSGHY |
| | | ADLQRFQRDCGDASQEQHQRDL | | ISDVYDFQKQAWFTYNDLCV |
| | | ENGSALESELVHERDRAIGEKE | | SEISETKMQEARLHSGYIFF |
| | | LPVADSLMDQGDISLPVMYEDG | | YMHN |
| | | GKLISSPDTRLVEVHLQEVPQH | | |
| | | PELQKYEKTNTFVEFNEDSVTE | | |
| | | STNGFYDCKENRIPEGSQGMAE | | |
| | | QLQQCIEESIIDEFLQQAPPPG | | |
| | | VRKLDAQEHTEETLNQSTELRL | | |
| | | QKADLNHLGALGSDNPGNKNIL | | |
| | | DAENTRGEAKELTRNVKMGDPL | | |
| | | QAYRLISVVSHIGSSPNSGHYI | | |
| | | SDVYDFQKQAWFTYNDLCVSEI | | |
| | | SETKMQEARLHSGYIFFYMHNG | | |
| | | IFEELLRKAENSRLPSTQAGVI | | |
| | | PQGEYEGDSLYRPA | | |
| UBP6_HUMAN | 55 | MDMVENADSLQAQERKDILMKY | 167 | KGATGLSNLGNTCEMNSSIQ |
| Ubiquitin | | DKGHRAGLPEDKGPEPVGINSS | | CVSNTQPLTQYFISGRHLYE |
| carboxyl- | | IDRFGILHETELPPVTAREAKK | | LNRTNPIGMKGHMAKCYGDL |
| terminal | | IRREMTRTSKWMEMLGEWETYK | | VQELWSGTQKSVAPLKLRRT |
| hydrolase 6 | | HSSKLIDRVYKGIPMNIRGPVW | | IAKYAPKFDGFQQQDSQELL |
| | | SVLLNIQEIKLKNPGRYQIMKE | | AFLLDGLHEDLNRVHEKPYV |
| | | RGKRSSEHIHHIDLDVRTTLRN | | ELKDSDGRPDWE |
| | | HVFFRDRYGAKQRELFYILLAY | | VAAEAWDNHLRRNRSIIVDL |
| | | SEYNPEVGYCRDLSHITALFLL | | FHGQLRSQVKCKTCGHISVR |
| | | YLPEEDAFWALVQLLASERHSL | | FDPNFLSLPLPMDSYMDLEI |
| | | PGFHSPNGGTVQGLQDQQEHVV | | TVIKLDGTTPVRYGLRLNMD |
| | | PKSQPKTMWHQDKEGLCGQCAS | | EKYTGLKKQLRDLCGLNSEQ |
| | | LGCLLRNLIDGISLGLTLRLWD | | ILLAEVHDSNIKNFPQDNQK |
| | | VYLVEGEQVLMPIT | | VQLSVSGFLCAFEIPVPSSP |
| | | SIALKVQQKRLMKTSRCGLWAR | | ISASSPTQIDESSSPSTNGM |
| | | LRNQFFDTWAMNDDTVLKHLRA | | FTLTTNGDLPKPIFIPNGMP |
| | | STKKLTRKQGDLPPPAKREQGS | | NTVVPCGTEKNFTNGMVNGH |
| | | LAPRPVPASRGGKTLCKGYRQA | | MPSLPDSPFTGYIIAVHRKM |
| | | PPGPPAQFQRPICSASPPWASR | | MRTELYFLSPQENRPSLEGM |
| | | FSTPCPGGAVREDTYPVGTQGV | | PLIVPCTVHTRKKDLYDAVW |
| | | PSLALAQGGPQGSWRFLEWKSM | | IQVSWLARPLPPQEASIHAQ |
| | | PRLPTDLDIGGPWFPHYDFEWS | | DRDNCMGYQYPFTLRVVQKD |
| | | CWVRAISQEDQLATCWQAEHCG | | GNSCAWCPQYRFCRGCKIDC |
| | | EVHNKDMSWPEEMSFTANSSKI | | GEDRAFIGNAYIAVDWHPTA |
| | | DRQKVPTEKGATGLSNLGNTCF | | LHLRYQTSQERVVDKHESVE |
| | | MNSSIQCVSNTQPLTQYFISGR | | QSRRAQAEPINLDSCLRAFT |
| | | HLYELNRTNPIGMKGHMAKCYG | | SEEELGESEMYYCSKCKTHC |
| | | DLVQELWSGTQKSV | | LATKKLDLWRLPPFLIIHLK |
| | | APLKLRRTIAKYAPKEDGEQQQ | | RFQFVNDQWIKSQKIVRFLR |
| | | DSQELLAFLLDGLHEDLNRVHE | | ESFDPSAFLVPRDPALCQHK |
| | | KPYVELKDSDGRPDWEVAAEAW | | PLTPQGDELSKPRILAREVK |
| | | DNHLRRNRSIIVDLFHGQLRSQ | | KVDAQSSAGKEDMLLSKSPS |
| | | VKCKTCGHISVREDPENFLSLP | | SLSANISSSPKGSPSSSRKS |
| | | LPMDSYMDLEITVIKLDGTTPV | | GTSCPSSKNSSPNSSPRTLG |
| | | RYGLRLNMDEKYTGLKKQLRDL | | RSKGRLRLPQIGSKNKPSSS |
| | | CGLNSEQILLAEVHDSNIKNFP | | KKNLDASKENGAGQICELAD |
| | | QDNQKVQLSVSGFLCAFEIPVP | | ALSRGHMRGGSQPELVTPQD |
| | | SSPISASSPTQIDESSSPSTNG | | HEVALANGFLYEHEACGNGC |
| | | MFTLTINGDLPKPIFIPNGMPN | | GDGYSNGQLGNHSEEDSTDD |
| | | TVVPCGTEKNFTNGMVNGHMPS | | QREDTHIKPIYNLYAISCHS |
| | | LPDSPFTGYIIAVHRKMMRTEL | | GILSGGHYITYAKNPNCKWY |
| | | YFLSPQENRPSLFG | | CYNDSSCEELHPDEIDTDSA |
| | | MPLIVPCTVHTRKKDLYDAVWI | | YILFYEQQG |
| | | QVSWLARPLPPQEASIHAQDRD | | |
| | | NCMGYQYPFTLRVVQKDGNSCA | | |
| | | WCPQYRFCRGCKIDCGEDRAFI | | |
| | | GNAYIAVDWHPTALHLRYQTSQ | | |
| | | ERVVDKHESVEQSRRAQAEPIN | | |
| | | LDSCLRAFTSEEELGESEMYYC | | |
| | | SKCKTHCLATKKLDLWRLPPEL | | |
| | | IIHLKRFQFVNDQWIKSQKIVR | | |
| | | FLRESFDPSAFLVPRDPALCQH | | |
| | | KPLTPQGDELSKPRILAREVKK | | |
| | | VDAQSSAGKEDMLLSKSPSSLS | | |
| | | ANISSSPKGSPSSSRKSGTSCP | | |
| | | SSKNSSPNSSPRTL | | |
| | | GRSKGRLRLPQIGSKNKPSSSK | | |
| | | KNLDASKENGAGQICELADALS | | |
| | | RGHMRGGSQPELVTPQDHEVAL | | |
| | | ANGFLYEHEACGNGCGDGYSNG | | |
| | | QLGNHSEEDSTDDQREDTHIKP | | |
| | | IYNLYAISCHSGILSGGHYITY | | |
| | | AKNPNCKWYCYNDSSCEELHPD | | |
| | | EIDTDSAYILFYEQQGIDYAQF | | |
| | | LPKIDGKKMADTSSTDEDSESD | | |
| | | YEKYSMLQ | | |
| UBP53_HUMAN | 56 | MAWVKFLRKPGGNLGKVYQPGS | 168 | APTKGLLNEPGQNSCFLNSA |
| Inactive | | MLSLAPTKGLLNEPGQNSCFLN | | VQVLWQLDIFRRSLRVLTGH |
| ubiquitin | | SAVQVLWQLDIFRRSLRVLTGH | | VCQGDACIFCALKTIFAQFQ |
| carboxyl- | | VCQGDACIFCALKTIFAQFQHS | | HSREKALPSDNIRHALAESF |
| terminal | | REKALPSDNIRHALAESFKDEQ | | KDEQRFQLGLMDDAAECFEN |
| hydrolase 53 | | RFQLGLMDDAAECFENMLERIH | | MLERIHFHIVPSRDADMCTS |
| | | FHIVPSRDADMCTSKSCITHQK | | KSCITHQKFAMTLYEQCVCR |
| | | FAMTLYEQCVCRSCGASSDPLP | | SCGASSDPLPFTEFVRYIST |
| | | FTEFVRYISTTALCNEVERMLE | | TALCNEVERMLERHERFKPE |
| | | RHERFKPEMFAELLQAANTTDD | | MFAELLQAANTTDDYRKCPS |
| | | YRKCPSNCGQKIKIRRVLMNCP | | NCGQKIKIRRVLMNCPEIVT |
| | | EIVTIGLVWDSEHSDLTEAVVR | | IGLVWDSEHSDLTEAVVRNL |
| | | NLATHLYLPGLFYRVTDENAKN | | ATHLYLPGLFYRVTDENAKN |
| | | SELNLVGMICYTSQ | | SELNLVGMICYTSQHYCAFA |
| | | HYCAFAFHTKSSKWVFEDDANV | | FHTKSSKWVFEDDANVKEIG |
| | | KEIGTRWKDVVSKCIRCHFQPL | | TRWKDVVSKCIRCHFQPLLL |
| | | LLFYANPDGTAVSTEDALRQVI | | FYANPDGTAVSTEDALRQVI |
| | | SWSHYKSVAENMGCEKPVIHKS | | SWSHYKSVAENMGCEKPVIH |
| | | DNLKENGFGDQAKQRENQKEPT | | KSDNLKENGFGDQAKQRENQ |
| | | DNISSSNRSHSHTGVGKGPAKL | | KFPTDNISSSNRSHSHTGVG |
| | | SHIDQREKIKDISRECALKAIE | | KGPAKLSHIDQREKIKDISR |
| | | QKNLLSSQRKDLEKGQRKDLGR | | ECALKAIEQKNLLSSQRKDL |
| | | HRDLVDEDLSHFQSGSPPAPNG | | EKGQRK |
| | | FKQHGNPHLYHSQGKGSYKHDR | | |
| | | VVPQSRASAQIISSSKSQILAP | | |
| | | GEKITGKVKSDNGTGYDTDSSQ | | |
| | | DSRDRGNSCDSSSKSRNRGWKP | | |
| | | MRETLNVDSIFSES | | |
| | | EKRQHSPRHKPNISNKPKSSKD | | |
| | | PSFSNWPKENPKQKGLMTIYED | | |
| | | EMKQEIGSRSSLESNGKGAEKN | | |
| | | KGLVEGKVHGDNWQMQRTESGY | | |
| | | ESSDHISNGSTNLDSPVIDGNG | | |
| | | TVMDISGVKETVCFSDQITTSN | | |
| | | LNKERGDCTSLQSQHHLEGERK | | |
| | | ELRNLEAGYKSHEFHPESHLQI | | |
| | | KNHLIKRSHVHEDNGKLFPSSS | | |
| | | LQIPKDHNAREHIHQSDEQKLE | | |
| | | KPNECKESEWLNIENSERTGLP | | |
| | | FHVDNSASGKRVNSNEPSSLWS | | |
| | | SHLRTVGLKPETAPLIQQQNIM | | |
| | | DQCYFENSLSTECI | | |
| | | IRSASRSDGCQMPKLFCQNLPP | | |
| | | PLPPKKYAITSVPQSEKSESTP | | |
| | | DVKLTEVFKATSHLPKHSLSTA | | |
| | | SEPSLEVSTHMNDERHKETFQV | | |
| | | RECFGNTPNCPSSSSTNDEQAN | | |
| | | SGAIDAFCQPELDSISTCPNET | | |
| | | VSLTTYFSVDSCMTDTYRLKYH | | |
| | | QRPKLSFPESSGFCNNSLS | | |
| U17LO_HUMAN | 57 | MEDDSLYLRGEWQFNHESKLTS | 169 | AVGAGLQNMGNTCYVNASLQ |
| Ubiquitin | | SRPDAAFAEIQRTSLPEKSPLS | | CLTYTPPLANYMLSREHSQT |
| carboxyl- | | CETRVDLCDDLAPVARQLAPRE | | CHRHKGCMLCTMQAHITRAL |
| terminal | | KLPLSSRRPAAVGAGLQNMGNT | | HNPGHVIQPSQALAAGFHRG |
| hydrolase 17- | | CYVNASLQCLTYTPPLANYMLS | | KQEDAHEFLMFTVDAMKKAC |
| like protein 24 | | REHSQTCHRHKGCMLCTMQAHI | | LPGHKQVDHHSKDTTLIHQI |
| | | TRALHNPGHVIQPSQALAAGFH | | FGGYWRSQIKCLHCHGISDT |
| | | RGKQEDAHEFLMFTVDAMKKAC | | FDPYLDIALDIQAAQSVQQA |
| | | LPGHKQVDHHSKDTTLIHQIFG | | LEQLVKPEELNGENAYHCGV |
| | | GYWRSQIKCLHCHGISDTEDPY | | CLQRAPASKTLTLHTSAKVL |
| | | LDIALDIQAAQSVQQALEQLVK | | ILVLKRFSDVTGNKIAKNVQ |
| | | PEELNGENAYHCGVCLQRAPAS | | YPECLDMQPYMSQPNTGPLV |
| | | KTLTLHTSAKVLILVLKRESDV | | YVLYAVLVHAGWSCHNGHYF |
| | | TGNKIAKNVQYPEC | | SYVKAQEGQWYKMDDAEVTA |
| | | LDMQPYMSQPNTGPLVYVLYAV | | SSITSVLSQQAYVLFYIQKS |
| | | LVHAGWSCHNGHYFSYVKAQEG | | |
| | | QWYKMDDAEVTASSITSVLSQQ | | |
| | | AYVLFYIQKSEWERHSESVSRG | | |
| | | REPRALGAEDTDRRATQGELKR | | |
| | | DHPCLQAPELDEHLVERATQES | | |
| | | TLDHWKFLQEQNKTKPEFNVRK | | |
| | | VEGTLPPDVLVIHQSKYKCGMK | | |
| | | NHHPEQQSSLLNLSSSTPTHQE | | |
| | | SMNTGTLASLRGRARRSKGKNK | | |
| | | HSKRALLVCQ | | |
| U17LM_ | | MEDDSLYLGGEWQFNHFSKLTS | | AVGAGLQNMGNTCYVNASLQ |
| HUMAN | | SRPDAAFAEIQRTSLPEKSPLS | | CLTYTPPLANYMLSREHSQT |
| Ubiquitin | | CETRVDLCDDLAPVARQLAPRE | | CHRHKGCMLCTMQAHITRAL |
| carboxyl- | | KLPLSSRRPAAVGAGLQNMGNT | | HNPGHVIQPSQALAAGFHRG |
| terminal | | CYVNASLQCLTYTPPLANYMLS | | KQEDAHEFLMFTVDAMKKAC |
| hydrolase 17- | | REHSQTCHRHKGCMLCTMQAHI | | LPGHKQVDHHSKDTTLIHQI |
| like protein 22 | | TRALHNPGHVIQPSQALAAGFH | | FGGYWRSQIKCLHCHGISDT |
| | | RGKQEDAHEFLMFTVDAMKKAC | | FDPYLDIALDIQAAQSVQQA |
| | | LPGHKQVDHHSKDTTLIHQIFG | | LEQLVKPEELNGENAYHCGV |
| | | GYWRSQIKCLHCHGISDTFDPY | | CLQRAPASKTLTLHTSAKVL |
| | | LDIALDIQAAQSVQQALEQLVK | | ILVLKRFSDVTGNKIAKNVQ |
| | | PEELNGENAYHCGVCLQRAPAS | | YPECLDMQPYMSQQNTGPLV |
| | | KTLTLHTSAKVLILVLKRESDV | | YVLYAVLVHAGWSCHNGHYF |
| | | TGNKIAKNVQYPEC | | SYVKAQEGQWYKMDDAEVTA |
| | | LDMQPYMSQQNTGPLVYVLYAV | | SSITSVLSQQAYVLFYIQKS |
| | | LVHAGWSCHNGHYFSYVKAQEG | | |
| | | QWYKMDDAEVTASSITSVLSQQ | | |
| | | AYVLFYIQKSEWERHSESVSRG | | |
| | | REPRALGAEDTDRRATQGELKR | | |
| | | DHPCLQAPELDEHLVERATQES | | |
| | | TLDHWKFLQEQNKTKPEFNVRK | | |
| | | VEGTLPPDVLVIHQSKYKCGMK | | |
| | | NHHPEQQSSLLKLSSTTPTHQE | | |
| | | SMNTGTLASLRGRARRSKGKNK | | |
| | | HSKRALLVCQ | | |
| UBP5_HUMAN | 58 | MAELSEEALLSVLPTIRVPKAG | 170 | FGPGYTGIRNLGNSCYLNSV |
| Ubiquitin | | DRVHKDECAFSEDTPESEGGLY | | VQVLFSIPDFQRKYVDKLEK |
| carboxyl- | | ICMNTFLGFGKQYVERHENKTG | | IFQNAPTDPTQDESTQVAKL |
| terminal | | QRVYLHLRRTRRPKEEDPATGT | | GHGLLSGEYSKPVPESGDGE |
| hydrolase 5 | | GDPPRKKPTRLAIGVEGGEDLS | | RVPEQKEVQDGIAPRMEKAL |
| | | EEKFELDEDVKIVILPDYLEIA | | IGKGHPEFSTNRQQDAQEFF |
| | | RDGLGGLPDIVRDRVTSAVEAL | | LHLINMVERNCRSSENPNEV |
| | | LSADSASRKQEVQAWDGEVRQV | | FRELVEEKIKCLATEKVKYT |
| | | SKHAFSLKQLDNPARIPPCGWK | | QRVDYIMQLPVPMDAALNKE |
| | | CSKCDMRENLWLNLTDGSILCG | | ELLEYEEKKRQAEEEKMALP |
| | | RRYFDGSGGNNHAVEHYRETGY | | ELVRAQVPESSCLEAYGAPE |
| | | PLAVKLGTITPDGADVYSYDED | | QVDDFWSTALQAKSVAVKTT |
| | | DMVLDPSLAEHLSHFGIDMLKM | | RFASFPDYLVIQIKKFTFGL |
| | | QKTDKTMTELEIDM | | DWVPKKLDVSIEMPEELDIS |
| | | NQRIGEWELIQESGVPLKPLFG | | QLRGTGLQPGEEELPDIAPP |
| | | PGYTGIRNLGNSCYLNSVVQVL | | LVTPDEPKGSLGFYGNEDED |
| | | FSIPDFQRKYVDKLEKIFQNAP | | SFCSPHESSPTSPMLDESVI |
| | | TDPTQDFSTQVAKLGHGLLSGE | | IQLVEMGFPMDACRKAVYYT |
| | | YSKPVPESGDGERVPEQKEVQD | | GNSGAEAAMNWVMSHMDDPD |
| | | GIAPRMFKALIGKGHPEFSTNR | | FANPLILPGSSGPGSTSAAA |
| | | QQDAQEFFLHLINMVERNCRSS | | DPPPEDCVTTIVSMGESRDQ |
| | | ENPNEVERELVEEKIKCLATEK | | ALKALRATNNSLERAVDWIE |
| | | VKYTQRVDYIMQLPVPMDAALN | | SHIDDLDAEAAMDISEGRSA |
| | | KEELLEYEEKKRQAEEEKMALP | | ADSISESVPVGPKVRDGPGK |
| | | ELVRAQVPFSSCLEAYGAPEQV | | YQLFAFISHMGTSTMCGHYV |
| | | DDFWSTALQAKSVAVKTTRFAS | | CHIKKEGRWVIYNDQKVCAS |
| | | FPDYLVIQIKKFTFGLDWVPKK | | EKPPKDLGYIYFYQRVA |
| | | LDVSIEMPEELDIS | | |
| | | QLRGTGLQPGEEELPDIAPPLV | | |
| | | TPDEPKGSLGFYGNEDEDSFCS | | |
| | | PHESSPTSPMLDESVIIQLVEM | | |
| | | GFPMDACRKAVYYTGNSGAEAA | | |
| | | MNWVMSHMDDPDFANPLILPGS | | |
| | | SGPGSTSAAADPPPEDCVTTIV | | |
| | | SMGFSRDQALKALRATNNSLER | | |
| | | AVDWIFSHIDDLDAEAAMDISE | | |
| | | GRSAADSISESVPVGPKVRDGP | | |
| | | GKYQLFAFISHMGTSTMCGHYV | | |
| | | CHIKKEGRWVIYNDQKVCASEK | | |
| | | PPKDLGYIYFYQRVAS | | |
| UBP25_HUMAN | 59 | MTVEQNVLQQSAAQKHQQTELN | | KAPVGLKNVGNTCWFSAVIQ |
| Ubiquitin | | QLREITGINDTQILQQALKDSN | | SLENLLEFRRLVLNYKPPSN |
| carboxyl- | | GNLELAVAFLTAKNAKTPQQEE | | AQDLPRNQKEHRNLPEMREL |
| terminal | | TTYYQTALPGNDRYISVGSQAD | | RYLFALLVGTKRKYVDPSRA |
| hydrolase 25 | | TNVIDLTGDDKDDLQRAIALSL | | VEILKDAFKSNDSQQQDVSE |
| | | AESNRAFRETGITDEEQAISRV | | FTHKLLDWLEDAFQMKAEEE |
| | | LEASIAENKACLKRTPTEVWRD | | TDEEKPKNPMVELFYGRELA |
| | | SRNPYDRKRQDKAPVGLKNVGN | | VGVLEGKKFENTEMFGQYPL |
| | | TCWFSAVIQSLENLLEFRRLVL | | QVNGFKDLHECLEAAMIEGE |
| | | NYKPPSNAQDLPRNQKEHRNLP | | IESLHSENSGKSGQEHWFTE |
| | | FMRELRYLFALLVGTKRKYVDP | | LPPVLTFELSRFEFNQALGR |
| | | SRAVEILKDAFKSNDSQQQDVS | | PEKIHNKLEFPQVLYLDRYM |
| | | EFTHKLLDWLEDAFQMKAEEET | | HRNREITRIKREEIKRLKDY |
| | | DEEKPKNPMVELFY | | LTVLQQRLERYLSYGSGPKR |
| | | GRFLAVGVLEGKKFENTEMFGQ | | FPLVDVLQYALEFASSKPVC |
| | | YPLQVNGFKDLHECLEAAMIEG | | TSPVDDIDASSPPSGSIPSQ |
| | | EIESLHSENSGKSGQEHWFTEL | | TLPSTTEQQGALSSELPSTS |
| | | PPVLTFELSRFEFNQALGRPEK | | PSSVAAISSRSVIHKPFTQS |
| | | IHNKLEFPQVLYLDRYMHRNRE | | RIPPDLPMHPAPRHITEEEL |
| | | ITRIKREEIKRLKDYLTVLQQR | | SVLESCLHRWRTEIENDTRD |
| | | LERYLSYGSGPKRFPLVDVLQY | | LQESISRIHRTIELMYSDKS |
| | | ALEFASSKPVCTSPVDDIDASS | | MIQVPYRLHAVLVHEGQANA |
| | | PPSGSIPSQTLPSTTEQQGALS | | GHYWAYIFDHRESRWMKYND |
| | | SELPSTSPSSVAAISSRSVIHK | | IAVTKSSWEELVRDSEGGYR |
| | | PFTQSRIPPDLPMHPAPRHITE | | NAS |
| | | EELSVLESCLHRWRTEIENDTR | | |
| | | DLQESISRIHRTIELMYSDKSM | | |
| | | IQVPYRLHAVLVHE | | |
| | | GQANAGHYWAYIFDHRESRWMK | | |
| | | YNDIAVTKSSWEELVRDSFGGY | | |
| | | RNASAYCLMYINDKAQFLIQEE | | |
| | | FNKETGQPLVGIETLPPDLRDE | | |
| | | VEEDNQRFEKELEEWDAQLAQK | | |
| | | ALQEKLLASQKLRESETSVTTA | | |
| | | QAAGDPEYLEQPSRSDESKHLK | | |
| | | EETIQIITKASHEHEDKSPETV | | |
| | | LQSAIKLEYARLVKLAQEDTPP | | |
| | | ETDYRLHHVVVYFIQNQAPKKI | | |
| | | IEKTLLEQFGDRNLSFDERCHN | | |
| | | IMKVAQAKLEMIKPEEVNLEEY | | |
| | | EEWHQDYRKERETTMYLIIGLE | | |
| | | NFQRESYIDSLLEL | | |
| | | ICAYQNNKELLSKGLYRGHDEE | | |
| | | LISHYRRECLLKLNEQAAELFE | | |
| | | SGEDREVNNGLIIMNEFIVPEL | | |
| | | PLLLVDEMEEKDILAVEDMRNR | | |
| | | WCSYLGQEMEPHLQEKLTDELP | | |
| | | KLLDCSMEIKSFHEPPKLPSYS | | |
| | | THELCERFARIMLSLSRTPADG | | |
| | | R | | |
| UBP33_HUMAN | 60 | MTGSNSHITILTLKVLPHFESL | 171 | ARGLTGLKNIGNTCYMNAAL |
| Ubiquitin | | GKQEKIPNKMSAFRNHCPHLDS | | QALSNCPPLTQFELDCGGLA |
| carboxyl- | | VGEITKEDLIQKSLGTCQDCKV | | RTDKKPAICKSYLKLMTELW |
| terminal | | QGPNLWACLENRCSYVGCGESQ | | HKSRPGSVVPTTLFQGIKTV |
| hydrolase 33 | | VDHSTIHSQETKHYLTVNLTTL | | NPTFRGYSQQDAQEFLRCLM |
| | | RVWCYACSKEVELDRKLGTQPS | | DLLHEELKEQVMEVEEDPQT |
| | | LPHVRQPHQIQENSVQDEKIPS | | ITTEETMEEDKSQSDVDFQS |
| | | NTTLKTPLVAVEDDLDIEADEE | | CESCSNSDRAENENGSRCES |
| | | DELRARGLTGLKNIGNTCYMNA | | EDNNETTMLIQDDENNSEMS |
| | | ALQALSNCPPLTQFFLDCGGLA | | KDWQKEKMCNKINKVNSEGE |
| | | RTDKKPAICKSYLKLMTELWHK | | FDKDRDSISETVDLNNQETV |
| | | SRPGSVVPTTLFQGIKTVNPTF | | KVQIHSRASEYITDVHSNDL |
| | | RGYSQQDAQEFLRCLMDLLHEE | | STPQILPSNEGVNPRLSASP |
| | | LKEQVMEVEEDPQT | | PKSGNLWPGLAPPHKKAQSA |
| | | ITTEETMEEDKSQSDVDFQSCE | | SPKRKKQHKKYRSVISDIED |
| | | SCSNSDRAENENGSRCESEDNN | | GTIISSVQCLTCDRVSVTLE |
| | | ETTMLIQDDENNSEMSKDWQKE | | TFQDLSLPIPGKEDLAKLHS |
| | | KMCNKINKVNSEGEFDKDRDSI | | SSHPTSIVKAGSCGEAYAPQ |
| | | SETVDLNNQETVKVQIHSRASE | | GWIAFFMEYVKRFVVSCVPS |
| | | YITDVHSNDLSTPQILPSNEGV | | WFWGPVVTLQDCLAAFFARD |
| | | NPRLSASPPKSGNLWPGLAPPH | | ELKGDNMYSCEKCKKLRNGV |
| | | KKAQSASPKRKKQHKKYRSVIS | | KFCKVQNFPEILCIHLKRER |
| | | DIFDGTIISSVQCLTCDRVSVT | | HELMESTKISTHVSFPLEGL |
| | | LETFQDLSLPIPGKEDLAKLHS | | DLQPFLAKDSPAQIVTYDLL |
| | | SSHPTSIVKAGSCGEAYAPQGW | | SVICHHGTASSGHYIAYCRN |
| | | IAFFMEYVKRFVVSCVPSWEWG | | NLNNLWYEFDDQSVTEVSES |
| | | PVVTLQDCLAAFFARDELKGDN | | TVQNAEAYVLFYRKSS |
| | | MYSCEKCKKLRNGV | | |
| | | KFCKVQNFPEILCIHLKRFRHE | | |
| | | LMFSTKISTHVSFPLEGLDLQP | | |
| | | FLAKDSPAQIVTYDLLSVICHH | | |
| | | GTASSGHYIAYCRNNLNNLWYE | | |
| | | FDDQSVTEVSESTVQNAEAYVL | | |
| | | FYRKSSEEAQKERRRISNLLNI | | |
| | | MEPSLLQFYISRQWLNKFKTFA | | |
| | | EPGPISNNDFLCIHGGVPPRKA | | |
| | | GYIEDLVLMLPQNIWDNLYSRY | | |
| | | GGGPAVNHLYICHTCQIEAEKI | | |
| | | EKRRKTELEIFIRLNRAFQKED | | |
| | | SPATFYCISMQWFREWESFVKG | | |
| | | KDGDPPGPIDNTKIAVTKCGNV | | |
| | | MLRQGADSGQISEETWNFLQSI | | |
| | | YGGGPEVILRPPVVHVDPDILQ | | |
| | | AEEKIEVETRSL | | |
| UBP21_HUMAN | 61 | MPQASEHRLGRTREPPVNIQPR | 172 | LGSGHVGLRNLGNTCFLNAV |
| Ubiquitin | | VGSKLPFAPRARSKERRNPASG | | LQCLSSTRPLRDFCLRRDER |
| carboxyl- | | PNPMLRPLPPRPGLPDERLKKL | | QEVPGGGRAQELTEAFADVI |
| terminal | | ELGRGRTSGPRPRGPLRADHGV | | GALWHPDSCEAVNPTRFRAV |
| hydrolase 21 | | PLPGSPPPTVALPLPSRTNLAR | | FQKYVPSFSGYSQQDAQEFL |
| | | SKSVSSGDLRPMGIALGGHRGT | | KLLMERLHLEINRRGRRAPP |
| | | GELGAALSRLALRPEPPTLRRS | | ILANGPVPSPPRRGGALLEE |
| | | TSLRRLGGFPGPPTLESIRTEP | | PELSDDDRANLMWK |
| | | PASHGSFHMISARSSEPFYSDD | | RYLEREDSKIVDLFVGQLKS |
| | | KMAHHTLLLGSGHVGLRNLGNT | | CLKCQACGYRSTTFEVECDL |
| | | CFLNAVLQCLSSTRPLRDFCLR | | SLPIPKKGFAGGKVSLRDCF |
| | | RDFRQEVPGGGRAQELTEAFAD | | NLFTKEEELESENAPVCDRC |
| | | VIGALWHPDSCEAVNPTRFRAV | | RQKTRSTKKLTVQRFPRILV |
| | | FQKYVPSFSGYSQQ | | LHLNRFSASRGSIKKSSVGV |
| | | DAQEFLKLLMERLHLEINRRGR | | DFPLQRLSLGDFASDKAGSP |
| | | RAPPILANGPVPSPPRRGGALL | | VYQLYALCNHSGSVHYGHYT |
| | | EEPELSDDDRANLMWKRYLERE | | ALCRCQTGWHVYNDSRVSPV |
| | | DSKIVDLFVGQLKSCLKCQACG | | SENQVASSEGYVLFYQLMQ |
| | | YRSTTFEVFCDLSLPIPKKGFA | | |
| | | GGKVSLRDCENLFTKEEELESE | | |
| | | NAPVCDRCRQKTRSTKKLTVQR | | |
| | | FPRILVLHLNRESASRGSIKKS | | |
| | | SVGVDFPLQRLSLGDFASDKAG | | |
| | | SPVYQLYALCNHSGSVHYGHYT | | |
| | | ALCRCQTGWHVYNDSRVSPVSE | | |
| | | NQVASSEGYVLFYQLMQEPPRC | | |
| | | L | | |
| U17L4_HUMAN | 62 | MGDDSLYLGGEWQFNHESKLTS | 173 | AVGAGLQNMGNTCYENASLQ |
| Inactive | | SRPDAAFAEIQRTSLPEKSPLS | | CLTYTLPLANYMLSREHSQT |
| ubiquitin | | SETRVDLCDDLAPVARQLAPRE | | CQRPKCCMLCTMQAHITWAL |
| carboxyl- | | KLPLSSRRPAAVGAGLQNMGNT | | HSPGHVIQPSQALAAGFHRG |
| terminal | | CYENASLQCLTYTLPLANYMLS | | KQEDVHEFLMFTVDAMKKAC |
| hydrolase 17- | | REHSQTCQRPKCCMLCTMQAHI | | LPGHKQVDHHSKDTTLIHQI |
| like protein 4 | | TWALHSPGHVIQPSQALAAGFH | | FGGCWRSQIKCLHCHGISDT |
| | | RGKQEDVHEFLMFTVDAMKKAC | | FDPYLDIALDIQAAQSVKQA |
| | | LPGHKQVDHHSKDTTLIHQIFG | | LEQLVKPEELNGENAYHCGL |
| | | GCWRSQIKCLHCHGISDTFDPY | | CLQRAPASNTLTLHTSAKVL |
| | | LDIALDIQAAQSVKQALEQLVK | | ILVLKRESDVAGNKLAKNVQ |
| | | PEELNGENAYHCGLCLQRAPAS | | YPECLDMQPYMSQQNTGPLV |
| | | | | YVLYAVLVHAGWSCHDGYYE |
| | | NTLTLHTSAKVLILVLKRFSDV | 174 | SYVKAQEGQWYKMDDAEVTV |
| | | AGNKLAKNVQYPEC | | CSITSVLSQQAYVLFYIQKS |
| | | LDMQPYMSQQNTGPLVYVLYAV | | AVGAGLQNMGNTCYVNASLQ |
| | | LVHAGWSCHDGYYFSYVKAQEG | | CLTYTPPLANYMLSREHSQT |
| | | QWYKMDDAEVTVCSITSVLSQQ | | CHRHKGCMLCTMQAHITRAL |
| | | AYVLFYIQKSEWERHSESVSRG | | HNPGHVIQPSQALAAGFHRG |
| | | REPRALGAEDTDRPATQGELKR | | KQEDAHEFLMFTVDAMKKAC |
| | | DHPCLQVPELDEHLVERATEES | | LPGHKQVDHHSKDTTLIHQI |
| | | TLDHWKFPQEQNKMKPEFNVRK | | FGGYWRSQIKCLHCHGISDT |
| | | VEGTLPPNVLVIHQSKYKCGMK | | |
| | | NHHPEQQSSLLNLSSMNSTDQE | | |
| | | SMNTGTLASLQGRTRRSKGKNK | | |
| | | HSKRSLLVCQ | | |
| | | MEDDSLYLGGEWQFNHFSKLTS | | |
| | | SRPDAAFAEIQRTSLPEKSPLS | | |
| | | CETRVDLCDDLAPVARQLAPRE | | |
| | | KLPLSSRRPAAVGAGLQNMGNT | | |
| | | CYVNASLQCLTYTPPLANYMLS | | |
| | | REHSQTCHRHKGCMLCTMQAHI | | |
| U17LK_HUMAN | 63 | TRALHNPGHVIQPSQALAAGFH | | FDPYLDIALDIQAAQSVQQA |
| Ubiquitin | | RGKQEDAHEFLMFTVDAMKKAC | | LEQLVKPEELNGENAYHCGV |
| carboxyl- | | LPGHKQVDHHSKDTTLIHQIFG | | CLQRAPASKTLTLHTSAKVL |
| terminal | | GYWRSQIKCLHCHGISDTEDPY | | ILVLKRFSDVTGNKIAKNVQ |
| hydrolase 17- | | LDIALDIQAAQSVQQALEQLVK | | YPECLDMQPYMSQPNTGPLV |
| like protein 20 | | PEELNGENAYHCGVCLQRAPAS | | YVLYAVLVHAGWSCHNGHYF |
| | | KTLTLHTSAKVLILVLKRFSDV | | SYVKAQEGQWYKMDDAEVTA |
| | | TGNKIAKNVQYPECLDMQPYMS | | SSITSVLSQQAYVLFYIQKS |
| | | QPNTGPLVYVLYAVLVHAGWSC | | |
| | | HNGHYFSYVKAQEGQWYKMDDA | | |
| | | EVTASSITSVLSQQAYVLFYIQ | | |
| | | KSEWERHSESVSRGREPRALGA | | |
| | | EDTDRRATQGELKRDHPCLQAP | | |
| | | ELDEHLVERATQESTLDHWKEL | | |
| | | QEQNKTKPEFNVRKVEGTLPPD | | |
| | | VLVIHQSKYKCGMKNHHPEQQS | | |
| | | SLLNLSSTTPTHQESMNTGTLA | | |
| | | SLRGRARRSKGKNKHSKRALLV | | |
| | | CQ | | |
| UBP12_HUMAN | 64 | MEILMTVSKFASICTMGANASA | 175 | EHYFGLVNFGNTCYCNSVLQ |
| Ubiquitin | | LEKEIGPEQFPVNEHYFGLVNF | | ALYFCRPFREKVLAYKSQPR |
| carboxyl- | | GNTCYCNSVLQALYFCRPFREK | | KKESLLTCLADLFHSIATQK |
| terminal | | VLAYKSQPRKKESLLTCLADLF | | KKVGVIPPKKFITRLRKENE |
| hydrolase 12 | | HSIATQKKKVGVIPPKKFITRL | | LFDNYMQQDAHEFLNYLLNT |
| | | RKENELFDNYMQQDAHEFLNYL | | IADILQEERKQEKQNGRLPN |
| | | LNTIADILQEERKQEKQNGRLP | | GNIDNENNNSTPDPTWVHEI |
| | | NGNIDNENNNSTPDPTWVHEIF | | FQGTLTNETRCLTCETISSK |
| | | QGTLTNETRCLTCETISSKDED | | DEDFLDLSVDVEQNTSITHC |
| | | FLDLSVDVEQNTSITHCLRGES | | LRGESNTETLCSEYKYYCEE |
| | | NTETLCSEYKYYCEECRSKQEA | | CRSKQEAHKRMKVKKLPMIL |
| | | HKRMKVKKLPMILALHLKRFKY | | ALHLKRFKYMDQLHRYTKLS |
| | | | | YRVVFPLELRLENTSGDATN |
| | | MDQLHRYTKLSYRVVFPLELRL | | PDRMYDLVAVVVHCGSGPNR |
| | | FNTSGDATNPDRMY | | GHYIAIVKSHDFWLLEDDDI |
| | | DLVAVVVHCGSGPNRGHYIAIV | | VEKIDAQAIEEFYGLTSDIS |
| | | KSHDEWLLEDDDIVEKIDAQAI | | KNSESGYILFYQSR |
| | | EEFYGLTSDISKNSESGYILFY | | |
| | | QSRD | | |
| UL17C_HUMAN | 65 | MEEDSLYLGGEWQENHESKLTS | 176 | AVGAGLQNMGNTCYVNASLQ |
| Ubiquitin | | SRPDAAFAEIQRTSLPEKSPLS | | CLTYTPPLANYMLSREHSQT |
| carboxyl- | | CETRVDLCDDLAPVARQLAPRE | | CHRHKGCMLCTMQAHITRAL |
| terminal | | KLPLSNRRPAAVGAGLQNMGNT | | HNPGHVIQPSQALAAGFHRG |
| hydrolase 17- | | CYVNASLQCLTYTPPLANYMLS | | KQEDAHEFLMFTVDAMKKAC |
| like protein 12 | | REHSQTCHRHKGCMLCTMQAHI | | LPGHKQVDHHSKDTTLIHQI |
| | | TRALHNPGHVIQPSQALAAGFH | | FGGYWRSQIKCLHCHGISDT |
| | | RGKQEDAHEFLMFTVDAMKKAC | | FDPYLDIALDIQAAQSVQQA |
| | | LPGHKQVDHHSKDTTLIHQIFG | | LEQLVKPEELNGENAYHCGV |
| | | GYWRSQIKCLHCHGISDTFDPY | | CLQRAPASKMLTLLTSAKVL |
| | | LDIALDIQAAQSVQQALEQLVK | | ILVLKRFSDVTGNKIAKNVQ |
| | | PEELNGENAYHCGVCLQRAPAS | | YPECLDMQPYMSQPNTGPLV |
| | | KMLTLLTSAKVLILVLKRESDV | | YVLYAVLVHAGWSCHNGHYF |
| | | TGNKIAKNVQYPEC | | SYVKAQEGQWYKMDDAEVTA |
| | | LDMQPYMSQPNTGPLVYVLYAV | | SSITSVLSQQAYVLFYIQKS |
| | | LVHAGWSCHNGHYFSYVKAQEG | | |
| | | QWYKMDDAEVTASSITSVLSQQ | | |
| | | AYVLFYIQKSEWERHSESVSRG | | |
| | | REPRALGAEDTDRRATQGELKR | | |
| | | DHPCLQAPELDEHLVERATQES | | |
| | | TLDHWKFLQEQNKTKPEFNVRK | | |
| | | VEGTLPPDVLVIHQSKYKCGMK | | |
| | | NHHPEQQSSLLKLSSTTPTHQE | | |
| | | SMNTGTLASLRGRARRSKGKNK | | |
| | | HSKRALLVCQ | | |
| UBP20_HUMAN | 66 | MGDSRDLCPHLDSIGEVTKEDL | 177 | PRGLTGMKNLGNSCYMNAAL |
| Ubiquitin | | LLKSKGTCQSCGVTGPNLWACL | | QALSNCPPLTQFFLECGGLV |
| carboxyl- | | QVACPYVGCGESFADHSTIHAQ | | RTDKKPALCKSYQKLVSEVW |
| terminal | | AKKHNLTVNLTTFRLWCYACEK | | HKKRPSYVVPTSLSHGIKLV |
| hydrolase | | EVFLEQRLAAPLLGSSSKFSEQ | | NPMFRGYAQQDTQEFLRCLM |
| | | DSPPPSHPLKAVPIAVADEGES | | DQLHEELKEPVVATVALTEA |
| | | ESEDDDLKPRGLTGMKNLGNSC | | RDSDSSDTDEKREGDRSPSE |
| | | YMNAALQALSNCPPLTQFFLEC | | DEFLSCDSSSDRGEGDGQGR |
| | | GGLVRTDKKPALCKSYQKLVSE | | GGGSSQAETELLIPDEAGRA |
| | | VWHKKRPSYVVPTSLSHGIKLV | | ISEKERMKDRKESWGQQRTN |
| | | NPMFRGYAQQDTQEFLRCLMDQ | | SEQVDEDADVDTAMAALDDQ |
| | | LHEELKEPVVATVALTEARDSD | | PAEAQPPSPRSSSPCRTPEP |
| | | SSDTDEKREGDRSPSEDEFLSC | | DNDAHLRSSSRPCSPVHHHE |
| | | DSSSDRGEGDGQGR | | GHAKLSSSPPRASPVRMAPS |
| | | GGGSSQAETELLIPDEAGRAIS | | YVLKKAQVLSAGSRRRKEQR |
| | | EKERMKDRKFSWGQQRTNSEQV | | YRSVISDIFDGSILSLVQCL |
| | | DEDADVDTAMAALDDQPAEAQP | | TCDRVSTTVETFQDLSLPIP |
| | | PSPRSSSPCRTPEPDNDAHLRS | | GKEDLAKLHSAIYQNVPAKP |
| | | SSRPCSPVHHHEGHAKLSSSPP | | GACGDSYAAQGWLAFIVEYI |
| | | RASPVRMAPSYVLKKAQVLSAG | | RRFVVSCTPSWFWGPVVTLE |
| | | SRRRKEQRYRSVISDIFDGSIL | | DCLAAFFAADELKGDNMYSC |
| | | SLVQCLTCDRVSTTVETFQDLS | | ERCKKLRNGVKYCKVLRLPE |
| | | LPIPGKEDLAKLHSAIYQNVPA | | ILCIHLKRFRHEVMYSFKIN |
| | | KPGACGDSYAAQGWLAFIVEYI | | SHVSFPLEGLDLRPFLAKEC |
| | | RRFVVSCTPSWFWGPVVTLEDC | | TSQITTYDLLSVICHHGTAG |
| | | LAAFFAADELKGDNMYSCERCK | | SGHYIAYCQNVINGQWYEFD |
| | | KLRNGVKYCKVLRLPEILCIHL | | DQYVTEVHETVVQNAEGYVL |
| | | KRFRHEVMYSEKIN | | FYRKSS |
| | | SHVSFPLEGLDLRPFLAKECTS | | |
| | | QITTYDLLSVICHHGTAGSGHY | | |
| | | IAYCQNVINGQWYEFDDQYVTE | | |
| | | VHETVVQNAEGYVLFYRKSSEE | | |
| | | AMRERQQVVSLAAMREPSLLRE | | |
| | | YVSREWLNKENTFAEPGPITNQ | | |
| | | TELCSHGGIPPHKYHYIDDLVV | | |
| | | ILPQNVWEHLYNRFGGGPAVNH | | |
| | | LYVCSICQVEIEALAKRRRIEI | | |
| | | DTFIKLNKAFQAEESPGVIYCI | | |
| | | SMQWFREWEAFVKGKDNEPPGP | | |
| | | IDNSRIAQVKGSGHVQLKQGAD | | |
| | | YGQISEETWTYLNSLYGGGPEI | | |
| | | AIRQSVAQPLGPENLHGEQKIE | | |
| | | AETRAV | | |
| UBP46_HUMAN | 67 | MTVRNIASICNMGTNASALEKD | 178 | EHYFGLVNFGNTCYCNSVLQ |
| Ubiquitin | | IGPEQFPINEHYFGLVNFGNTC | | ALYFCRPFRENVLAYKAQQK |
| carboxyl- | | YCNSVLQALYFCRPERENVLAY | | KKENLLTCLADLFHSIATQK |
| terminal | | KAQQKKKENLLTCLADLFHSIA | | KKVGVIPPKKFISRLRKEND |
| hydrolase 46 | | TQKKKVGVIPPKKFISRLRKEN | | LFDNYMQQDAHEFLNYLLNT |
| | | DLFDNYMQQDAHEFLNYLLNTI | | IADILQEEKKQEKQNGKLKN |
| | | ADILQEEKKQEKQNGKLKNGNM | | GNMNEPAENNKPELTWVHEI |
| | | NEPAENNKPELTWVHEIFQGTL | | FQGTLTNETRCLNCETVSSK |
| | | TNETRCLNCETVSSKDEDELDL | | DEDFLDLSVDVEQNTSITHC |
| | | SVDVEQNTSITHCLRDESNTET | | LRDESNTETLCSEQKYYCET |
| | | LCSEQKYYCETCCSKQEAQKRM | | CCSKQEAQKRMRVKKLPMIL |
| | | RVKKLPMILALHLKRFKYMEQL | | ALHLKRFKYMEQLHRYTKLS |
| | | HRYTKLSYRVVFPLELRLENTS | | YRVVFPLELRLENTSSDAVN |
| | | SDAVNLDRMYDLVA | | LDRMYDLVAVVVHCGSGPNR |
| | | VVVHCGSGPNRGHYITIVKSHG | | GHYITIVKSHGFWLLFDDDI |
| | | FWLLEDDDIVEKIDAQAIEEFY | | VEKIDAQAIEEFYGLTSDIS |
| | | GLTSDISKNSESGYILFYQSRE | | KNSESGYILFYQSR |
| CYLD_HUMAN | 68 | MSSGLWSQEKVTSPYWEERIFY | 179 | GKKKGIQGHYNSCYLDSTLF |
| Ubiquitin | | LLLQECSVTDKQTQKLLKVPKG | | CLFAFSSVLDTVLLRPKEKN |
| carboxyl- | | SIGQYIQDRSVGHSRIPSAKGK | | DVEYYSETQELLRTEIVNPL |
| terminal | | KNQIGLKILEQPHAVLEVDEKD | | RIYGYVCATKIMKLRKILEK |
| hydrolase | | VVEINEKFTELLLAITNCEERF | | VEAASGFTSEEKDPEEFLNI |
| CYLD | | SLFKNRNRLSKGLQIDVGCPVK | | LFHHILRVEPLLKIRSAGQK |
| | | VQLRSGEEKFPGVVRERGPLLA | | VQDCYFYQIFME |
| | | ERTVSGIFFGVELLEEGRGQGF | | KNEKVGVPTIQQLLEWSFIN |
| | | TDGVYQGKQLFQCDEDCGVEVA | | SNLKFAEAPSCLIIQMPREG |
| | | LDKLELIEDDDTALESDYAGPG | | KDFKLFKKIFPSLELNITDL |
| | | DTMQVELPPLEINSRVSLKVGE | | LEDTPRQCRICGGLAMYECR |
| | | TIESGTVIFCDVLPGKESLGYE | | ECYDDPDISAGKIKQFCKTC |
| | | VGVDMDNPIGNWDGREDGVQLC | | NTQVHLHPKRLNHKYNPVSL |
| | | SFACVESTILLHIN | | PKDLPDWDWRHGCIPCQNME |
| | | DIIPALSESVTQERRPPKLAFM | | LFAVLCIETSHYVAFVKYGK |
| | | SRGVGDKGSSSHNKPKATGSTS | | DDSAWLFFDSMADRDGGQNG |
| | | DPGNRNRSELFYTLNGSSVDSQ | | FNIPQVTPCPEVGEYLKMSL |
| | | PQSKSKNTWYIDEVAEDPAKSL | | EDLHSLDSRRIQGCARRLLC |
| | | TEISTDEDRSSPPLQPPPVNSL | | DAYMCMYQSPT |
| | | TTENRFHSLPFSLTKMPNINGS | | |
| | | IGHSPLSLSAQSVMEELNTAPV | | |
| | | QESPPLAMPPGNSHGLEVGSLA | | |
| | | EVKENPPFYGVIRWIGQPPGLN | | |
| | | EVLAGLELEDECAGCTDGTERG | | |
| | | TRYFTCALKKALFVKLKSCRPD | | |
| | | SRFASLQPVSNQIERCNSLAFG | | |
| | | GYLSEVVEENTPPKMEKEGLEI | | |
| | | MIGKKKGIQGHYNS | | |
| | | CYLDSTLFCLFAFSSVLDTVLL | | |
| | | RPKEKNDVEYYSETQELLRTEI | | |
| | | VNPLRIYGYVCATKIMKLRKIL | | |
| | | EKVEAASGFTSEEKDPEEFLNI | | |
| | | LFHHILRVEPLLKIRSAGQKVQ | | |
| | | DCYFYQIFMEKNEKVGVPTIQQ | | |
| | | LLEWSFINSNLKFAEAPSCLII | | |
| | | QMPREGKDEKLFKKIFPSLELN | | |
| | | ITDLLEDTPRQCRICGGLAMYE | | |
| | | CRECYDDPDISAGKIKQFCKTC | | |
| | | NTQVHLHPKRLNHKYNPVSLPK | | |
| | | DLPDWDWRHGCIPCQNMELFAV | | |
| | | LCIETSHYVAFVKYGKDDSAWL | | |
| | | FFDSMADRDGGQNGFNIPQVTP | | |
| | | CPEVGEYLKMSLEDLHSLDSRR | | |
| | | IQGCARRLLCDAYMCMYQSPTM | | |
| | | SLYK | | |
| UBP16_HUMAN | 69 | MGKKRTKGKTVPIDDSSETLEP | 180 | ITVKGLSNLGNTCFFNAVMQ |
| Ubiquitin | | VCRHIRKGLEQGNLKKALVNVE | | NLSQTPVLRELLKEVKMSGT |
| carboxyl- | | WNICQDCKTDNKVKDKAEEETE | | IVKIEPPDLALTEPLEINLE |
| terminal | | EKPSVWLCLKCGHQGCGRNSQE | | PPGPLTLAMSQFLNEMQETK |
| hydrolase 16 | | QHALKHYLTPRSEPHCLVLSLD | | KGVVTPKELFSQVCKKAVRE |
| | | NWSVWCYVCDNEVQYCSSNQLG | | KGYQQQDSQELLRYLLDGMR |
| | | QVVDYVRKQASITTPKPAEKDN | | AEEHQRVSKGILKAFGNSTE |
| | | GNIELENKKLEKESKNEQEREK | | KLDEELKNKVKDYEKKKSMP |
| | | KENMAKENPPMNSPCQITVKGL | | SFVDRIFGGELTSMIMCDQC |
| | | SNLGNTCFFNAVMQNLSQTPVL | | RTVSLVHESELDLSLPVLDD |
| | | RELLKEVKMSGTIVKIEPPDLA | | QSGKKSVNDKNLKKTVEDED |
| | | LTEPLEINLEPPGPLTLAMSQF | | QDSEEEKDNDSYIKERSDIP |
| | | LNEMQETKKGVVTPKELFSQVC | | SGTSKHLQKKAKKQAKKQAK |
| | | KKAVRFKGYQQQDS | | NQRRQQKIQGKVLHLNDICT |
| | | QELLRYLLDGMRAEEHQRVSKG | | IDHPEDSEYEAEMSLQGEVN |
| | | ILKAFGNSTEKLDEELKNKVKD | | IKSNHISQEGVMHKEYCVNQ |
| | | YEKKKSMPSFVDRIFGGELTSM | | KDLNGQAKMIESVTDNQKST |
| | | IMCDQCRTVSLVHESFLDLSLP | | EEVDMKNINMDNDLEVLTSS |
| | | VLDDQSGKKSVNDKNLKKTVED | | PTRNLNGAYLTEGSNGEVDI |
| | | EDQDSEEEKDNDSYIKERSDIP | | SNGFKNLNLNAALHPDEINI |
| | | SGTSKHLQKKAKKQAKKQAKNQ | | EILNDSHTPGTKVYEVVNED |
| | | RRQQKIQGKVLHLNDICTIDHP | | PETAFCTLANREVENTDECS |
| | | EDSEYEAEMSLQGEVNIKSNHI | | IQHCLYQFTRNEKLRDANKL |
| | | SQEGVMHKEYCVNQKDLNGQAK | | LCEVCTRRQCNGPKANIKGE |
| | | MIESVTDNQKSTEEVDMKNINM | | RKHVYTNAKKQMLISLAPPV |
| | | DNDLEVLTSSPTRNLNGAYLTE | | LTLHLKRFQQAGENLRKVNK |
| | | GSNGEVDISNGFKNLNLNAALH | | HIKFPEIL |
| | | PDEINIEILNDSHT | | DLAPFCTLKCKNVAEENTRV |
| | | PGTKVYEVVNEDPETAFCTLAN | | LYSLYGVVEHSGTMRSGHYT |
| | | REVENTDECSIQHCLYQFTRNE | | AYAKARTANSHLSNLVLHGD |
| | | KLRDANKLLCEVCTRRQCNGPK | | IPQDFEMESKGQWFHISDTH |
| | | ANIKGERKHVYTNAKKQMLISL | | VQAVPTTKVLNSQAYLLFYE |
| | | APPVLTLHLKRFQQAGENLRKV | | RIL |
| | | NKHIKFPEILDLAPFCTLKCKN | | |
| | | VAEENTRVLYSLYGVVEHSGTM | | |
| | | RSGHYTAYAKARTANSHLSNLV | | |
| | | LHGDIPQDFEMESKGQWFHISD | | |
| | | THVQAVPTTKVLNSQAYLLFYE | | |
| | | RIL | | |
| ALG13_HUMAN | 70 | MKCVFVTVGTTSEDDLIACVSA | 181 | YRYKDSLKEDIQKADLVISH |
| Putative | | PDSLQKIESLGYNRLILQIGRG | | AGAGSCLETLEKGKPLVVVI |
| bifunctional | | TVVPEPESTESFTLDVYRYKDS | | NEKLMNNHQLELAKQLHKEG |
| UDP-N- | | LKEDIQKADLVISHAGAGSCLE | | HLFYCTCRVLTCPGQAKSIA |
| acetylglucosa | | TLEKGKPLVVVINEKLMNNHQL | | SAPGKCQDSAALTSTAFSGL |
| mine | | ELAKQLHKEGHLFYCTCRVLTC | | DFGLLSGYLHKQALVTATHP |
| transferase | | PGQAKSIASAPGKCQDSAALTS | | TCTLLFPSCHAFFPLPLTPT |
| and | | TAFSGLDFGLLSGYLHKQALVT | | LYKMHKGWKNYCSQKSLNEA |
| deubiquitinase | | ATHPTCTLLFPSCHAFFPLPLT | | SMDEYLGSLGLFRKLTAKDA |
| ALG13 | | PTLYKMHKGWKNYCSQKSLNEA | | SCLFRAISEQLFCSQVHHLE |
| | | SMDEYLGSLGLFRKLTAKDASC | | IRKACVSYMRENQQTFESYV |
| | | LFRAISEQLFCSQVHHLEIRKA | | EGSFEKYLERLGDPKESAGQ |
| | | CVSYMRENQQTFESYVEGSFEK | | LEIRALSLIYNRDFILYRFP |
| | | YLERLGDPKESAGQ | | GKPPTYVTDNGYEDKILLCY |
| | | LEIRALSLIYNRDFILYRFPGK | | SSSGHYDSVYS |
| | | PPTYVTDNGYEDKILLCYSSSG | | |
| | | HYDSVYSKQFQSSAAVCQAVLY | | |
| | | EILYKDVFVVDEEELKTAIKLE | | |
| | | RSGSKKNRNNAVTGSEDAHTDY | | |
| | | KSSNQNRMEEWGACYNAENIPE | | |
| | | GYNKGTEETKSPENPSKMPFPY | | |
| | | KVLKALDPEIYRNVEFDVWLDS | | |
| | | RKELQKSDYMEYAGRQYYLGDK | | |
| | | CQVCLESEGRYYNAHIQEVGNE | | |
| | | NNSVTVFIEELAEKHVVPLANL | | |
| | | KPVTQVMSVPAWNAMPSRKGRG | | |
| | | YQKMPGGYVPEIVISEMDIKQQ | | |
| | | KKMFKKIRGKEVYM | | |
| | | TMAYGKGDPLLPPRLQHSMHYG | | |
| | | HDPPMHYSQTAGNVMSNEHFHP | | |
| | | QHPSPRQGRGYGMPRNSSRFIN | | |
| | | RHNMPGPKVDFYPGPGKRCCQS | | |
| | | YDNESYRSRSFRRSHRQMSCVN | | |
| | | KESQYGFTPGNGQMPRGLEETI | | |
| | | TFYEVEEGDETAYPTLPNHGGP | | |
| | | STMVPATSGYCVGRRGHSSGKQ | | |
| | | TLNLEEGNGQSENGRYHEEYLY | | |
| | | RAEPDYETSGVYSTTASTANLS | | |
| | | LQDRKSCSMSPQDTVTSYNYPQ | | |
| | | KMMGNIAAVAASCANNVPAPVL | | |
| | | SNGAAANQAISTTSVSSQNAIQ | | |
| | | PLFVSPPTHGRPVI | | |
| | | ASPSYPCHSAIPHAGASLPPPP | | |
| | | PPPPPPPPPPPPPPPPPPPPPP | | |
| | | PALDVGETSNLQPPPPLPPPPY | | |
| | | SCDPSGSDLPQDTKVLQYYENL | | |
| | | GLQCYYHSYWHSMVYVPQMQQQ | | |
| | | LHVENYPVYTEPPLVDQTVPQC | | |
| | | YSEVRREDGIQAEASANDTEPN | | |
| | | ADSSSVPHGAVYYPVMSDPYGQ | | |
| | | PPLPGFDSCLPVVPDYSCVPPW | | |
| | | HPVGTAYGGSSQIHGAINPGPI | | |
| | | GCIAPSPPASHYVPQGM | | |
| OTU1_HUMAN | 71 | MFGPAKGRHFGVHPAPGFPGGV | 182 | QGLSSRTRVRELQGQIAAIT |
| Ubiquitin | | SQQAAGTKAGPAGAWPVGSRTD | | GIAPGGQRILVGYPPECLDL |
| thioesterase | | TMWRLRCKAKDGTHVLQGLSSR | | SNGDTILEDLPIQSGDMLII |
| OTU1 | | TRVRELQGQIAAITGIAPGGQR | | EEDQTRPRSSPAFTKRGASS |
| | | ILVGYPPECLDLSNGDTILEDL | | YVRETLPVLTRTVVPADNSC |
| | | PIQSGDMLIIEEDQTRPRSSPA | | LETSVYYVVEGGVLNPACAP |
| | | FTKRGASSYVRETLPVLTRTVV | | EMRRLIAQIVASDPDFYSEA |
| | | PADNSCLFTSVYYVVEGGVLNP | | ILGKTNQEYCDWIKRDDTWG |
| | | ACAPEMRRLIAQIVASDPDFYS | | GAIEISILSKFYQCEICVVD |
| | | EAILGKTNQEYCDWIKRDDTWG | | TQTVRIDRFGEDAGYTKRVL |
| | | GAIEISILSKFYQCEICVVDTQ | | LIYDGIHYDPLQ |
| | | TVRIDRFGEDAGYTKRVLLIYD | | |
| | | GIHYDPLQRNFPDPDTPPLTIF | | |
| | | SSNDDIVLVQALELADEARRRR | | |
| | | QFTDVNRFTLRCMVCQKGLTGQ | | |
| | | AEAREHAKETGHTNEGEV | | |
| OTUD1_HUMAN | 72 | MQLYSSVCTHYPAGAPGPTAAA | 183 | HREAAAVPAAKMPAFSSCFE |
| MOTU | | PAPPAAATPFKVSLQPPGAAGA | | VVSGAAAPASAAAGPPGASC |
| domain- | | APEPETGECQPAAAAEHREAAA | | KPPLPPHYTSTAQITVRALG |
| containing | | VPAAKMPAFSSCFEVVSGAAAP | | ADRLLLHGPDPVPGAAGSAA |
| protein 1 | | ASAAAGPPGASCKPPLPPHYTS | | APRGRCLLLAPAPAAPVPPR |
| | | TAQITVRALGADRLLLHGPDPV | | RGSSAWLLEELLRPDCPEPA |
| | | PGAAGSAAAPRGRCLLLAPAPA | | GLDATREGPDRNERLSEHRQ |
| | | APVPPRRGSSAWLLEELLRPDC | | ALAAAKHRGPAATPGSPDPG |
| | | PEPAGLDATREGPDRNERLSEH | | PGPWGEEHLAERGPRGWERG |
| | | RQALAAAKHRGPAATPGSPDPG | | GDRCDAPGGDAARRPDPEAE |
| | | PGPWGEEHLAERGPRGWERGGD | | APPAGSIEAAPSSAAEPVIV |
| | | RCDAPGGDAARRPDPEAEAPPA | | SRSDPRDEKLALYLAEVEKQ |
| | | GSIEAAPSSAAEPVIVSRSDPR | | DKYLRQRNKYRFHIIPDGNC |
| | | DEKLALYLAEVEKQ | | LYRAVSKTVYGDQSLHRELR |
| | | DKYLRQRNKYRFHIIPDGNCLY | | EQTVHYIADHLDHFSPLIEG |
| | | RAVSKTVYGDQSLHRELREQTV | | DVGEFIIAAAQDGAWAGYPE |
| | | HYIADHLDHESPLIEGDVGEFI | | LLAMGQMLNVNIHLTTGGRL |
| | | IAAAQDGAWAGYPELLAMGQML | | ESPTVSTMIHYLGPEDSLRP |
| | | NVNIHLTTGGRLESPTVSTMIH | | SIWLSWLSNGHYDAV |
| | | YLGPEDSLRPSIWLSWLSNGHY | | |
| | | DAVFDHSYPNPEYDNWCKQTQV | | |
| | | QRKRDEELAKSMAISLSKMYIE | | |
| | | QNACS | | |
| OTU6B_HUMAN | 73 | MEAVLTEELDEEEQLLRRHRKE | 184 | QKHREELEQLKLTTKENKID |
| MAN | | KKELQAKIQGMKNAVPKNDKKR | | SVAVNISNLVLENQPPRISK |
| Deubiquitinas | | RKQLTEDVAKLEKEMEQKHREE | | AQKRREKKAALEKEREERIA |
| e OTUD6B | | LEQLKLTTKENKIDSVAVNISN | | EAEIENLTGARHMESEKLAQ |
| | | LVLENQPPRISKAQKRREKKAA | | ILAARQLEIKQIPSDGHCMY |
| | | LEKEREERIAEAEIENLTGARH | | KAIEDQLKEKDCALTVVALR |
| | | MESEKLAQILAARQLEIKQIPS | | SQTAEYMQSHVEDFLPFLTN |
| | | DGHCMYKAIEDQLKEKDCALTV | | PNTGDMYTPEEFQKYCEDIV |
| | | VALRSQTAEYMQSHVEDELPEL | | NTAAWGGQLELRALSHILQT |
| | | TNPNTGDMYTPEEFQKYCEDIV | | PIEIIQADSPPIIVGEEYSK |
| | | NTAAWGGQLELRALSHILQTPI | | KPLILVYMRHAYG |
| | | EIIQADSPPIIVGEEYSKKPLI | | |
| | | LVYMRHAYGLGEHYNSVTRLVN | | |
| | | IVTENCS | | |
| OTU6A_HUMAN | 74 | MDDPKSEQQRILRRHQRERQEL | 185 | QELEKFQDDSSIESVVEDLA |
| MOTU | | QAQIRSLKNSVPKTDKTKRKQL | | KMNLENRPPRSSKAHRKRER |
| domain- | | LQDVARMEAEMAQKHRQELEKF | | MESEERERQESIFQAEMSEH |
| containing | | QDDSSIESVVEDLAKMNLENRP | | LAGFKREEEEKLAAILGARG |
| protein 6A | | PRSSKAHRKRERMESEERERQE | | LEMKAIPADGHCMYRAIQDQ |
| | | SIFQAEMSEHLAGFKREEEEKL | | LVFSVSVEMLRCRTASYMKK |
| | | AAILGARGLEMKAIPADGHCMY | | HVDEFLPFFSNPETSDSEGY |
| | | RAIQDQLVFSVSVEMLRCRTAS | | DDFMIYCDNIVRTTAWGGQL |
| | | YMKKHVDEFLPFFSNPETSDSF | | ELRALSHVLKTPIEVIQADS |
| | | GYDDFMIYCDNIVRTTAWGGQL | | PTLIIGEEYVKKPIILVYLR |
| | | ELRALSHVLKTPIEVIQADSPT | | YAYS |
| | | LIIGEEYVKKPIILVYLRYAYS | | |
| | | LGEHYNSVTPLEAGAAGGVLPR | | |
| | | LL | | |
| OTUB1_ | 75 | MAAEEPQQQKQEPLGSDSEGVN | 75 | MAAEEPQQQKQEPLGSDSEG |
| HUMAN | | CLAYDEAIMAQQDRIQQEIAVQ | | VNCLAYDEAIMAQQDRIQQE |
| Ubiquitin | | NPLVSERLELSVLYKEYAEDDN | | IAVQNPLVSERLELSVLYKE |
| thioesterase | | IYQQKIKDLHKKYSYIRKTRPD | | YAEDDNIYQQKIKDLHKKYS |
| OTUB1 | | GNCFYRAFGFSHLEALLDDSKE | | YIRKTRPDGNCFYRAFGESH |
| | | LQRFKAVSAKSKEDLVSQGFTE | | LEALLDDSKELQRFKAVSAK |
| | | FTIEDEHNTFMDLIEQVEKQTS | | SKEDLVSQGFTEFTIEDEHN |
| | | VADLLASENDQSTSDYLVVYLR | | TEMDLIEQVEKQTSVADLLA |
| | | LLTSGYLQRESKFFEHFIEGGR | | SENDQSTSDYLVVYLRLLTS |
| | | TVKEFCQQEVEPMCKESDHIHI | | GYLQRESKFFEHFIEGGRTV |
| | | IALAQALSVSIQVEYMDRGEGG | | KEFCQQEVEPMCKESDHIHI |
| | | TTNPHIFPEGSEPKVYLLYRPG | | IALAQALSVSIQVEYMDRGE |
| | | HYDILYK | | GGTTNPHIFPEGSEPKVYLL |
| | | | | YRPGHYDILYK |
| OTU7A_HUMAN | 76 | MVSSVLPNPTSAECWAALLHDP | 186 | SDYEQLRQVHTANLPHVENE |
| MOTU | | MTLDMDAVLSDFVRSTGAEPGL | | GRGPKQPEREPQPGHKVERP |
| domain- | | ARDLLEGKNWDLTAALSDYEQL | | CLQRQDDIAQEKRLSRGISH |
| containing | | RQVHTANLPHVENEGRGPKQPE | | ASSAIVSLARSHVASECNNE |
| protein 7A | | REPQPGHKVERPCLQRQDDIAQ | | QFPLEMPIYTFQLPDLSVYS |
| | | EKRLSRGISHASSAIVSLARSH | | EDERSFIERDLIEQATMVAL |
| | | VASECNNEQFPLEMPIYTFQLP | | EQAGRLNWWSTVCTSCKRLL |
| | | DLSVYSEDERSFIERDLIEQAT | | PLATTGDGNCLLHAASLGMW |
| | | MVALEQAGRLNWWSTVCTSCKR | | GFHDRDLVLRKALYTMMRTG |
| | | LLPLATTGDGNCLLHAASLGMW | | AEREALKRRWRWQQTQQNKE |
| | | GFHDRDLVLRKALYTMMRTGAE | | EEWEREWTELLKLASSEPRT |
| | | REALKRRWRWQQTQQNKEEEWE | | HFSKNGGTGGGVDNSEDPVY |
| | | REWTELLKLASSEPRTHESKNG | | ESLEEFHVEVLAHILRRPIV |
| | | GTGGGVDNSEDPVY | | VVADTMLRDSGGEAFAPIPE |
| | | ESLEEFHVEVLAHILRRPIVVV | | GGIYLPLEVPPNRCHCSPLV |
| | | ADTMLRDSGGEAFAPIPEGGIY | | LAYDQAHFSAL |
| | | LPLEVPPNRCHCSPLVLAYDQA | | |
| | | HFSALVSMEQRDQQREQAVIPL | | |
| | | TDSEHKLLPLHFAVDPGKDWEW | | |
| | | GKDDNDNARLAHLILSLEAKLN | | |
| | | LLHSYMNVTWIRIPSETRAPLA | | |
| | | QPESPTASAGEDVQSLADSLDS | | |
| | | DRDSVCSNSNSNNGKNGKDKEK | | |
| | | EKQRKEKDKTRADSVANKLGSF | | |
| | | SKTLGIKLKKNMGGLGGLVHGK | | |
| | | MGRANSANGKNGDSAERGKEKK | | |
| | | AKSRKGSKEESGASASTSPSEK | | |
| | | TTPSPTDKAAGASP | | |
| | | AEKGGGPRGDAWKYSTDVKLSL | | |
| | | NILRAAMQGERKFIFAGLLLTS | | |
| | | HRHQFHEEMIGYYLTSAQERES | | |
| | | AEQEQRRRDAATAAAAAAAAAA | | |
| | | ATAKRPPRRPETEGVPVPERAS | | |
| | | PGPPTQLVLKLKERPSPGPAAG | | |
| | | RAARAAAGGTASPGGGARRASA | | |
| | | SGPVPGRSPPAPARQSVIHVQA | | |
| | | SGARDEACAPAVGALRPCATYP | | |
| | | QQNRSLSSQSYSPARAAALRTV | | |
| | | NTVESLARAVPGALPGAAGTAG | | |
| | | AAEHKSQTYTNGFGALRDGLEF | | |
| | | ADADAPTARSNGECGRGGPGPV | | |
| | | QRRCQRENCAFYGRAETEHYCS | | |
| | | YCYREELRRRREARGARP | | |
| OTUD4_HUMAN | 77 | MEAAVGVPDGGDQGGAGPREDA | 187 | MEAAVGVPDGGDQGGAGPRE |
| MOTU | | TPMDAYLRKLGLYRKLVAKDGS | | DATPMDAYLRKLGLYRKLVA |
| domain- | | CLFRAVAEQVLHSQSRHVEVRM | | KDGSCLFRAVAEQVLHSQSR |
| containing | | ACIHYLRENREKFEAFIEGSFE | | HVEVRMACIHYLRENREKFE |
| protein | | EYLKRLENPQEWVGQVEISALS | | AFIEGSFEEYLKRLENPQEW |
| 4 | | LMYRKDFIIYREPNVSPSQVTE | | VGQVEISALSLMYRKDFIIY |
| | | NNFPEKVLLCESNGNHYDIVYP | | REPNVSPSQVTENNFPEKVL |
| | | IKYKESSAMCQSLLYELLYEKV | | LCFSNGNHYDIVYP |
| | | FKTDVSKIVMELDTLEVADEDN | | |
| | | SEISDSEDDSCKSKTAAAAADV | | |
| | | NGFKPLSGNEQLKNNGNSTSLP | | |
| | | LSRKVLKSLNPAVYRNVEYEIW | | |
| | | LKSKQAQQKRDYSIAAGLQYEV | | |
| | | GDKCQVRLDHNGKF | | |
| | | LNADVQGIHSENGPVLVEELGK | | |
| | | KHTSKNLKAPPPESWNTVSGKK | | |
| | | MKKPSTSGQNFHSDVDYRGPKN | | |
| | | PSKPIKAPSALPPRLQHPSGVR | | |
| | | QHAFSSHSSGSQSQKESSEHKN | | |
| | | LSRTPSQIIRKPDRERVEDEDH | | |
| | | TSRESNYFGLSPEERREKQAIE | | |
| | | ESRLLYEIQNRDEQAFPALSSS | | |
| | | SVNQSASQSSNPCVQRKSSHVG | | |
| | | DRKGSRRRMDTEERKDKDSIHG | | |
| | | HSQLDKRPEPSTLENITDDKYA | | |
| | | TVSSPSKSKKLECPSPAEQKPA | | |
| | | EHVSLSNPAPLLVSPEVHLTPA | | |
| | | VPSLPATVPAWPSE | | |
| | | PTTFGPTGVPAPIPVLSVTQTL | | |
| | | TTGPDSAVSQAHLTPSPVPVSI | | |
| | | QAVNQPLMPLPQTLSLYQDPLY | | |
| | | PGFPCNEKGDRAIVPPYSLCQT | | |
| | | GEDLPKDKNILRFFFNLGVKAY | | |
| | | SCPMWAPHSYLYPLHQAYLAAC | | |
| | | RMYPKVPVPVYPHNPWFQEAPA | | |
| | | AQNESDCTCTDAHFPMQTEASV | | |
| | | NGQMPQPEIGPPTFSSPLVIPP | | |
| | | SQVSESHGQLSYQADLESETPG | | |
| | | QLLHADYEESLSGKNMFPQSFG | | |
| | | PNPFLGPVPIAPPFFPHVWYGY | | |
| | | PFQGFIENPVMRQNIVLPSDEK | | |
| | | GELDLSLENLDLS | | |
| | | KDCGSVSTVDEFPEARGEHVHS | | |
| | | LPEASVSSKPDEGRTEQSSQTR | | |
| | | KADTALASIPPVAEGKAHPPTQ | | |
| | | ILNRERETVPVELEPKRTIQSL | | |
| | | KEKTEKVKDPKTAADVVSPGAN | | |
| | | SVDSRVQRPKEESSEDENEVSN | | |
| | | ILRSGRSKQFYNQTYGSRKYKS | | |
| | | DWGYSGRGGYQHVRSEESWKGQ | | |
| | | PSRSRDEGYQYHRNVRGRPERG | | |
| | | DRRRSGMGDGHRGQHT | | |
| OTUB2_ | 78 | MSETSENLISEKCDILSILRDH | 78 | MSETSENLISEKCDILSILR |
| HUMAN | | PENRIYRRKIEELSKRFTAIRK | | DHPENRIYRRKIEELSKRFT |
| Ubiquitin | | TKGDGNCFYRALGYSYLESLLG | | AIRKTKGDGNCFYRALGYSY |
| thioesterase | | KSREIFKFKERVLQTPNDLLAA | | LESLLGKSREIFKFKERVLQ |
| OTUB2 | | GFEEHKERNFFNAFYSVVELVE | | TPNDLLAAGFEEHKERNFEN |
| | | KDGSVSSLLKVENDQSASDHIV | | AFYSVVELVEKDGSVSSLLK |
| | | QFLRLLTSAFIRNRADFFRHFI | | VENDQSASDHIVQFLRLLTS |
| | | DEEMDIKDFCTHEVEPMATECD | | AFIRNRADFFRHFIDEEMDI |
| | | HIQITALSQALSIALQVEYVDE | | KDFCTHEVEPMATECDHIQI |
| | | MDTALNHHVFPEAATPSVYLLY | | TALSQALSIALQVEYVDEMD |
| | | KTSHYNILYAADKH | | TALNHHVFPEAATPSVYLLY |
| | | | | KTSHYNILYAADKH |
| OTUD3_HUMAN | 79 | MSRKQAAKSRPGSGSRKAEAER | 188 | MSRKQAAKSRPGSGSRKAEA |
| MOTU | | KRDERAARRALAKERRNRPESG | | ERKRDERAARRALAKERRNR |
| domain- | | GGGGCEEEFVSFANQLQALGLK | | PESGGGGGCEEEFVSFANQL |
| containing | | LREVPGDGNCLFRALGDQLEGH | | QALGLKLREVPGDGNCLFRA |
| protein 3 | | SRNHLKHRQETVDYMIKQREDE | | LGDQLEGHSRNHLKHRQETV |
| | | EPFVEDDIPFEKHVASLAKPGT | | DYMIKQREDFEPFVEDDIPF |
| | | FAGNDAIVAFARNHQLNVVIHQ | | EKHVASLAKPGTFAGNDAIV |
| | | LNAPLWQIRGTEKSSVRELHIA | | AFARNHQLNVVIHQLNAPLW |
| | | YRYGEHYDSVRRINDNSEAPAH | | QIRGTEKSSVRELHIAYRYG |
| | | LQTDFQMLHQDESNKREKIKTK | | EHYDSVRR |
| | | GMDSEDDLRDEVEDAVQKVCNA | | |
| | | TGCSDENLIVQNLEAENYNIES | | |
| | | AIIAVLRMNQGKRNNAEENLEP | | |
| | | SGRVLKQCGPLWEE | | |
| | | GGSGARIFGNQGLNEGRTENNK | | |
| | | AQASPSEENKANKNQLAKVINK | | |
| | | QRREQQWMEKKKRQEERHRHKA | | |
| | | LESRGSHRDNNRSEAEANTQVT | | |
| | | LVKTFAALNI | | |
| OTU7B_HUMAN | 80 | MTLDMDAVLSDFVRSTGAEPGL | 189 | MTLDMDAVLSDFVRSTGAEP |
| MOTU | | ARDLLEGKNWDVNAALSDFEQL | | GLARDLLEGKNWDVNAALSD |
| domain- | | RQVHAGNLPPSFSEGSGGSRTP | | FEQLRQVHAGNLPPSFSEGS |
| containing | | EKGFSDREPTRPPRPILQRQDD | | GGSRTPEKGFSDREPTRPPR |
| | | IVQEKRLSRGISHASSSIVSLA | | PILQRQDDIVQEKRLSRGIS |
| | | RSHVSSNGGGGGSNEHPLEMPI | | HASSSIVSLARSHVSSNGGG |
| | | CAFQLPDLTVYNEDERSFIERD | | GGSNEHPLEMPICAFQLPDL |
| | | LIEQSMLVALEQAGRLNWWVSV | | TVYNEDERSFIERDLIEQSM |
| | | DPTSQRLLPLATTGDGNCLLHA | | LVALEQAGRLNWWVSVDPTS |
| | | ASLGMWGFHDRDLMLRKALYAL | | QRLLPLATTGDGNCLLHAAS |
| | | MEKGVEKEALKRRWRWQQTQQN | | LGMWGFHDRDLMLRKALYAL |
| | | KESGLVYTEDEWQKEWNELIKL | | MEKGVEKEALKRRWRWQQTQ |
| | | ASSEPRMHLGTNGANCGGVESS | | QNKESGLVYTEDEWQKEWNE |
| | | EEPVYESLEEFHVEVLAHVLRR | | LIKLASSEPRMHLGTNGANC |
| | | PIVVVADTMLRDSGGEAFAPIP | | GGVESSEEPVYESLEEFHVE |
| | | FGGIYLPLEVPASQCHRSPLVL | | VLAHVLRRPIVVVADTMLRD |
| | | AYDQAHFSALVSMEQKENTKEQ | | SGGEAFAPIPFGGIYLPLEV |
| | | AVIPLTDSEYKLLPLHFAVDPG | | PASQCHRSPLVLAYDQAHES |
| | | KGWEWGKDDSDNVRLASVILSL | | AL |
| protein 7B | | EVKLHLLHSYMNVKWIPLSSDA | 293 | PPSFSEGSGGSRTPEKGFSD |
| (Also referred | | QAPLAQPESPTASAGDEPRSTP | | REPTRPPRPILQRQDDIVQE |
| to herein as | | ESGDSDKESVGSSSTSNEGGRR | | KRLSRGISHASSSIVSLARS |
| Cezanne) | | KEKSKRDREKDKKRADSVANKL | | HVSSNGGGGGSNEHPLEMPI |
| | | GSFGKTLGSKLKKNMGGLMHSK | 190 | CAFQLPDLTVYNEDERSFIE |
| | | GSKPGGVGTGLGGSSGTETLEK | | RDLIEQSMLVALEQAGRLNW |
| | | KKKNSLKSWKGGKEEAAGDGPV | | WVSVDPTSQRLLPLATTGDG |
| | | SEKPPAESVGNGGSKYSQEVMQ | | NCLLHAASLGMWGFHDRDLM |
| | | SLSILRTAMQGEGKFIFVGTLK | | LRKALYALMEKGVEKEALKR |
| | | MGHRHQYQEEMIQRYLSDAEER | | RWRWQQTQQNKESGLVYTED |
| | | FLAEQKQKEAERKIMNGGIGGG | | EWQKEWNELIKLASSEPRMH |
| | | PPPAKKPEPDAREEQPTGPPAE | | LGTNGANCGGVESSEEPVYE |
| | | SRAMAFSTGYPGDFTIPRPSGG | | SLEEFHVFVLAHVLRRPIVV |
| | | GVHCQEPRRQLAGGPCVGGLPP | | VADTMLRDSGGEAFAPIPFG |
| | | YATFPRQCPPGRPYPHQDSIPS | | GIYLPLEVPASQCHRSPLVL |
| | | LEPGSHSKDGLHRGALLPPPYR | | AYDQAHFSALVSMEQKENTK |
| | | VADSYSNGYREPPEPDGWAGGL | | EQAVIPLTDSEYKLLPLHFA |
| | | RGLPPTQTKCKQPNCSFYGHPE | | VDPGKGWEWGKDDSDNVRLA |
| | | TNNFCSCCYREELRRREREPDG | | SVILSLEVKLHLLHSYMNVK |
| | | ELLVHRE | | WIPLSSDAQAPLAQ |
| | | MTILPKKKPPPPDADPANEPPP | | |
| | | PGPMPPAPRRGGGVGVGGGGTG | | |
| | | VGGGDRDRDSGVVGARPRASPP | | |
| | | PQGPLPGPPGALHRWALAVPPG | | |
| | | AVAGPRPQQASPPPCGGPGGPG | | |
| | | GGPGDALGAAAAGVGAAGVVVG | | |
| OTUD5_HUMAN | 81 | VGGAVGVGGCCSGPGHSKRRRQ | | MTILPKKKPPPPDADPANEP |
| MOTU | | APGVGAVGGGSPEREEVGAGYN | | PPPGPMPPAPRRGGGVGVGG |
| domain- | | SEDEYEAAAARIEAMDPATVEQ | | GGTGVGGGDRDRDSGVVGAR |
| containing | | QEHWFEKALRDKKGFIIKQMKE | | PRASPPPQGPLPGPPGALHR |
| protein 5 | | DGACLFRAVADQVYGDQDMHEV | | WALAVPPGAVAGPRPQQASP |
| | | VRKHCMDYLMKNADYFSNYVTE | | PPCGGPGGPGGGPGDALGAA |
| | | DETTYINRKRKNNCHGNHIEMQ | | AAGVGAAGVVVGVGGAVGVG |
| | | AMAEMYNRPVEVYQ | | GCCSGPGHSKRRRQAPGVGA |
| | | YSTGTSAVEPINTFHGIHQNED | | VGGGSPEREEVGAGYNSEDE |
| | | EPIRVSYHRNIHYNSVVNPNKA | | YEAAAARIEAMDPATVEQQE |
| | | TIGVGLGLPSFKPGFAEQSLMK | | HWFEKALRDKKGFIIKQMKE |
| | | NAIKTSEESWIEQQMLEDKKRA | | DGACLFRAVADQVYGDQDMH |
| | | TDWEATNEAIEEQVARESYLQW | | EVVRKHCMDYLMKNADYFSN |
| | | LRDQEKQARQVRGPSQPRKASA | | YVTEDETTYINRKRKNNCHG |
| | | TCSSATAAASSGLEEWTSRSPR | | NHIEMQAMAEMYNRPVEVYQ |
| | | QRSSASSPEHPELHAELGMKPP | | YSTGTSAVEPINTFHGIHQN |
| | | SPGTVLALAKPPSPCAPGTSSQ | | EDEPIRVSYHRNIHYNSV |
| | | FSAGADRATSPLVSLYPALECR | | |
| | | ALIQQMSPSAFGLNDWDDDEIL | | |
| | | ASVLAVSQQEYLDSMKKNKVHR | | |
| | | DPPPDKS | | |
| TNAP3_HUMAN | 82 | MAEQVLPQALYLSNMRKAVKIR | 191 | MAEQVLPQALYLSNMRKAVK |
| Tumor | | ERTPEDIFKPTNGIIHHFKTMH | | IRERTPEDIFKPTNGIIHHF |
| necrosis factor | | RYTLEMERTCQFCPQFREIIHK | | KTMHRYTLEMERTCQFCPQF |
| alpha-induced | | ALIDRNIQATLESQKKLNWCRE | | REIIHKALIDRNIQATLESQ |
| protein 3 | | VRKLVALKTNGDGNCLMHATSQ | | KKLNWCREVRKLVALKTNGD |
| | | YMWGVQDTDLVLRKALFSTLKE | | GNCLMHATSQYMWGVQDTDL |
| | | TDTRNFKFRWQLESLKSQEFVE | | VLRKALFSTLKETDTRNFKF |
| | | TGLCYDTRNWNDEWDNLIKMAS | | RWQLESLKSQEFVETGLCYD |
| | | TDTPMARSGLQYNSLEEIHIFV | | TRNWNDEWDNLIKMASTDTP |
| | | LCNILRRPIIVISDKMLRSLES | | MARSGLQYNSLEEIHIFVLC |
| | | GSNFAPLKVGGIYLPLHWPAQE | | NILRRPIIVISDKMLRSLES |
| | | CYRYPIVLGYDSHHFVPLVTLK | | GSNFAPLKVGGIYLPLHWPA |
| | | DSGPEIRAVPLVNRDRGRFEDL | | QECYRYPIVLGYDSHHFVPL |
| | | KVHELTDPENEMKE | | |
| | | KLLKEYLMVIEIPVQGWDHGTT | | |
| | | HLINAAKLDEANLPKEINLVDD | | |
| | | YFELVQHEYKKWQENSEQGRRE | | |
| | | GHAQNPMEPSVPQLSLMDVKCE | | |
| | | TPNCPFFMSVNTQPLCHECSER | | |
| | | RQKNQNKLPKLNSKPGPEGLPG | | |
| | | MALGASRGEAYEPLAWNPEEST | | |
| | | GGPHSAPPTAPSPELFSETTAM | | |
| | | KCRSPGCPFTLNVQHNGFCERC | | |
| | | HNARQLHASHAPDHTRHLDPGK | | |
| | | CQACLQDVTRTENGICSTCFKR | | |
| | | TTAEASSSLSTSLPPSCHQRSK | | |
| | | SDPSRLVRSPSPHSCHRAGNDA | | |
| | | PAGCLSQAARTPGD | | |
| | | RTGTSKCRKAGCVYFGTPENKG | | |
| | | FCTLCFIEYRENKHFAAASGKV | | |
| | | SPTASRFQNTIPCLGRECGTLG | | |
| | | STMFEGYCQKCFIEAQNQRFHE | | |
| | | AKRTEEQLRSSQRRDVPRTTQS | | |
| | | TSRPKCARASCKNILACRSEEL | | |
| | | CMECQHPNQRMGPGAHRGEPAP | | |
| | | EDPPKQRCRAPACDHEGNAKCN | | |
| | | GYCNECFQFKQMYG | | |
| ZRAN1_ | 83 | MSERGIKWACEYCTYENWPSAI | 192 | MSERGIKWACEYCTYENWPS |
| HUMAN | | KCTMCRAQRPSGTIITEDPFKS | | AIKCTMCRAQRPSGTIITED |
| Ubiquitin | | GSSDVGRDWDPSSTEGGSSPLI | | PFKSGSSDVGRDWDPSSTEG |
| thioesterase | | CPDSSARPRVKSSYSMENANKW | | GSSPLICPDSSARPRVKSSY |
| ZRANB1 | | SCHMCTYLNWPRAIRCTQCLSQ | | SMENANKWSCHMCTYLNWPR |
| | | RRTRSPTESPQSSGSGSRPVAF | | AIRCTQCLSQRRTRSPTESP |
| | | SVDPCEEYNDRNKLNTRTQHWT | | QSSGSGSRPVAFSVDPCEEY |
| | | CSVCTYENWAKAKRCVVCDHPR | | NDRNKLNTRTQHWTCSVCTY |
| | | PNNIEAIELAETEEASSIINEQ | | ENWAKAKRCVVCDHPRPNNI |
| | | DRARWRGSCSSGNSQRRSPPAT | | EAIELAETEEASSIINEQDR |
| | | KRDSEVKMDFQRIELAGAVGSK | | ARWRGSCSSGNSQRRSPPAT |
| | | EELEVDEKKLKQIKNRMKKTDW | | KRDSEVKMDFQRIELAGAVG |
| | | LFLNACVGVVEGDLAAIEAYKS | | SKEELEVDEKKLKQIKNRMK |
| | | SGGDIARQLTADEV | | KTDWLFLNACVGVVEGDLAA |
| | | RLLNRPSAFDVGYTLVHLAIRE | | IEAYKSSGGDIARQLTADEV |
| | | QRQDMLAILLTEVSQQAAKCIP | | RLLNRPSAFDVGYTLVHLAI |
| | | AMVCPELTEQIRREIAASLHQR | | RFQRQDMLAILLTEVSQQAA |
| | | KGDFACYFLTDLVTFTLPADIE | | KCIPAMVCPELTEQIRREIA |
| | | DLPPTVQEKLEDEVLDRDVQKE | | ASLHQRKGDFACYFLTDLVT |
| | | LEEESPIINWSLELATRLDSRL | | FTLPADIEDLPPTVQEKLED |
| | | YALWNRTAGDCLLDSVLQATWG | | EVLDRDVQKELEEESPIINW |
| | | IYDKDSVLRKALHDSLHDCSHW | | SLELATRLDSRLYALWNRTA |
| | | FYTRWKDWESWYSQSFGLHESL | | GDCLLDSVLQATWGIYDKDS |
| | | REEQWQEDWAFILSLASQPGAS | | VLRKALHDSLHDCSHWFYTR |
| | | LEQTHIFVLAHILRRPIIVYGV | | WKDWESWYSQSFGLHESLRE |
| | | KYYKSFRGETLGYTRFQGVYLP | | EQWQEDWAFILSLASQPGAS |
| | | LLWEQSFCWKSPIALGYTRGHF | | LEQTHIFVLAHILRRPIIVY |
| | | SALVAMENDGYGNR | | GVKYYKSFRGETLGYTREQG |
| | | GAGANLNTDDDVTITELPLVDS | | VYLPLLWEQSFCWKSPIALG |
| | | ERKLLHVHELSAQELGNEEQQE | | YTRGHFSAL |
| | | KLLREWLDCCVTEGGVLVAMQK | | |
| | | SSRRRNHPLVTQMVEKWLDRYR | | |
| | | QIRPCTSLSDGEEDEDDEDE | | |
| VCIP1_ | 84 | MSQPPPPPPPLPPPPPPPEAPQ | 193 | PASGSVSIECTECGQRHEQQ |
| HUMAN | | TPSSLASAAASGGLLKRRDRRI | | QLLGVEEVTDPDVVLHNLLR |
| Deubiquitinating | | LSGSCPDPKCQARLFFPASGSV | | NALLGVTGAPKKNTELVKVM |
| protein | | SIECTECGQRHEQQQLLGVEEV | | GLSNYHCKLLSPILARYGMD |
| VCIP135 | | TDPDVVLHNLLRNALLGVTGAP | | KQTGRAKLLRDMNQGELEDC |
| | | KKNTELVKVMGLSNYHCKLLSP | | ALLGDRAFLIEPEHVNTVGY |
| | | ILARYGMDKQTGRAKLLRDMNQ | | GKDRSGSLLYLHDTLEDIKR |
| | | GELFDCALLGDRAFLIEPEHVN | | ANKSQECLIPVHVDGDGHCL |
| | | TVGYGKDRSGSLLYLHDTLEDI | | VHAVSRALVGRELFWHALRE |
| | | KRANKSQECLIPVHVDGDGHCL | | NLKQHFQQHLARYQALFHDF |
| | | VHAVSRALVGRELFWHALRENL | | IDAAEWEDIINECDPLFVPP |
| | | KQHFQQHLARYQALFHDFIDAA | | EGVPLGLRNIHIFGLANVLH |
| | | EWEDIINECDPLFVPPEGVPLG | | RPIILLDSLSGMRSSGDYSA |
| | | LRNIHIFGLANVLH | | TFLPGLIPAEKCTGKDGHLN |
| | | RPIILLDSLSGMRSSGDYSATF | | KPICIAWSSSGRNHYIPL |
| | | LPGLIPAEKCTGKDGHLNKPIC | | |
| | | IAWSSSGRNHYIPLVGIKGAAL | | |
| | | PKLPMNLLPKAWGVPQDLIKKY | | |
| | | IKLEEDGGCVIGGDRSLQDKYL | | |
| | | LRLVAAMEEVEMDKHGIHPSLV | | |
| | | ADVHQYFYRRTGVIGVQPEEVT | | |
| | | AAAKKAVMDNRLHKCLLCGALS | | |
| | | ELHVPPEWLAPGGKLYNLAKST | | |
| | | HGQLRTDKNYSFPLNNLVCSYD | | |
| | | SVKDVLVPDYGMSNLTACNWCH | | |
| | | GTSVRKVRGDGSIVYLDGDRTN | | |
| | | SRSTGGKCGCGFKHFWDGKEYD | | |
| | | NLPEAFPITLEWGG | | |
| | | RVVRETVYWFQYESDSSLNSNV | | |
| | | YDVAMKLVTKHFPGEFGSEILV | | |
| | | QKVVHTILHQTAKKNPDDYTPV | | |
| | | NIDGAHAQRVGDVQGQESESQL | | |
| | | PTKIILTGQKTKTLHKEELNMS | | |
| | | KTERTIQQNITEQASVMQKRKT | | |
| | | EKLKQEQKGQPRTVSPSTIRDG | | |
| | | PSSAPATPTKAPYSPTTSKEKK | | |
| | | IRITTNDGRQSMVTLKSSTTFF | | |
| | | ELQESIAREFNIPPYLQCIRYG | | |
| | | FPPKELMPPQAGMEKEPVPLQH | | |
| | | GDRITIEILKSKAEGGQSAAAH | | |
| | | SAHTVKQEDIAVTGKLSSKELQ | | |
| | | EQAEKEMYSLCLLA | | |
| | | TLMGEDVWSYAKGLPHMFQQGG | | |
| | | VFYSIMKKTMGMADGKHCTFPH | | |
| | | LPGKTFVYNASEDRLELCVDAA | | |
| | | GHFPIGPDVEDLVKEAVSQVRA | | |
| | | EATTRSRESSPSHGLLKLGSGG | | |
| | | VVKKKSEQLHNVTAFQGKGHSL | | |
| | | GTASGNPHLDPRARETSVVRKH | | |
| | | NTGTDFSNSSTKTEPSVFTASS | | |
| | | SNSELIRIAPGVVTMRDGRQLD | | |
| | | PDLVEAQRKKLQEMVSSIQASM | | |
| | | DRHLRDQSTEQSPSDLPQRKTE | | |
| | | VVSSSAKSGSLQTGLPESEPLT | | |
| | | GGTENLNTETTDGCVADALGAA | | |
| | | FATRSKAQRGNSVEELEEMDSQ | | |
| | | DAEMTNTTEPMDHS | | |
| UCHL3_ | 85 | MEGQRWLPLEANPEVTNQFLKQ | 194 | QRWLPLEANPEVTNQFLKQL |
| HUMAN | | LGLHPNWQFVDVYGMDPELLSM | | GLHPNWQFVDVYGMDPELLS |
| Ubiquitin | | VPRPVCAVLLLFPITEKYEVER | | MVPRPVCAVLLLFPITEKYE |
| carboxyl- | | TEEEEKIKSQGQDVTSSVYFMK | | VERTEEEEKIKSQGQDVTSS |
| terminal | | QTISNACGTIGLIHAIANNKDK | | VYFMKQTISNACGTIGLIHA |
| hydrolase | | MHFESGSTLKKFLEESVSMSPE | | IANNKDKMHFESGSTLKKEL |
| isozyme L3 | | ERARYLENYDAIRVTHETSAHE | | EESVSMSPEERARYLENYDA |
| | | GQTEAPSIDEKVDLHFIALVHV | | IRVTHETSAHEGQTEAPSID |
| | | DGHLYELDGRKPFPINHGETSD | | EKVDLHFIALVHVDGHLYEL |
| | | ETLLEDAIEVCKKEMERDPDEL | | DGRKPFPINHGETSDETLLE |
| | | RENAIALSAA | | DAIEVCKKEMERDPDELREN |
| | | | | AIALSAA |
| UCHL1_ | 86 | MQLKPMEINPEMLNKVLSRLGV | 86 | MQLKPMEINPEMLNKVLSRL |
| HUMAN | | AGQWRFVDVLGLEEESLGSVPA | | GVAGQWRFVDVLGLEEESLG |
| Ubiquitin | | PACALLLLFPLTAQHENFRKKQ | | SVPAPACALLLLFPLTAQHE |
| carboxyl- | | IEELKGQEVSPKVYFMKQTIGN | | NFRKKQIEELKGQEVSPKVY |
| terminal | | SCGTIGLIHAVANNQDKLGFED | | FMKQTIGNSCGTIGLIHAVA |
| hydrolase | | GSVLKQFLSETEKMSPEDRAKC | | NNQDKLGFEDGSVLKQFLSE |
| isozyme L1 | | FEKNEAIQAAHDAVAQEGQCRV | | TEKMSPEDRAKCFEKNEAIQ |
| | | DDKVNFHFILENNVDGHLYELD | | AAHDAVAQEGQCRVDDKVNF |
| | | GRMPFPVNHGASSEDTLLKDAA | | HFILENNVDGHLYELDGRMP |
| | | KVCREFTEREQGEVRESAVALC | | FPVNHGASSEDTLLKDAAKV |
| | | KAA | | CREFTEREQGEVRESAVALC |
| | | | | KAA |
| UCHL5_ | 87 | MTGNAGEWCLMESDPGVFTELI | 195 | GEWCLMESDPGVFTELIKGF |
| HUMAN | | KGFGCRGAQVEEIWSLEPENFE | | GCRGAQVEEIWSLEPENFEK |
| Ubiquitin | | KLKPVHGLIFLFKWQPGEEPAG | | LKPVHGLIFLFKWQPGEEPA |
| carboxyl- | | SVVQDSRLDTIFFAKQVINNAC | | GSVVQDSRLDTIFFAKQVIN |
| terminal | | ATQAIVSVLLNCTHQDVHLGET | | NACATQAIVSVLLNCTHQDV |
| hydrolase | | LSEFKEFSQSFDAAMKGLALSN | | HLGETLSEFKEFSQSEDAAM |
| isozyme L5 | | SDVIRQVHNSFARQQMFEEDTK | | KGLALSNSDVIRQVHNSFAR |
| | | TSAKEEDAFHFVSYVPVNGRLY | | QQMFEFDTKTSAKEEDAFHF |
| | | ELDGLREGPIDLGACNQDDWIS | | VSYVPVNGRLYELDGLREGP |
| | | AVRPVIEKRIQKYSEGEIRENL | | IDLGACNQDDWISAVRPVIE |
| | | MAIVSDRKMIYEQKIAELQRQL | | KRIQKYSEGEIRFNLMAIVS |
| | | AEEEPMDTDQGNSMLSAIQSEV | | DRK |
| | | AKNQMLIEEEVQKLKRYKIENI | | |
| | | RRKHNYLPFIMELLKTLAEHQQ | | |
| | | LIPLVEKAKEKQNAKKAQETK | | |
| ATX3_HUMAN | 88 | MESIFHEKQEGSLCAQHCLNNL | 196 | ESIFHEKQEGSLCAQHCLNN |
| Ataxin-3 | | LQGEYFSPVELSSIAHQLDEEE | | LLQGEYFSPVELSSIAHQLD |
| | | RMRMAEGGVTSEDYRTFLQQPS | | EEERMRMAEGGVTSEDYRTE |
| | | GNMDDSGFFSIQVISNALKVWG | | LQQPSGNMDDSGFFSIQVIS |
| | | LELILENSPEYQRLRIDPINER | | NALKVWGLELILENSPEYQR |
| | | SFICNYKEHWFTVRKLGKQWEN | | LRIDPINERSFICNYKEHWE |
| | | LNSLLTGPELISDTYLALFLAQ | | TVRKLGKQWENLNSLLTGPE |
| | | LQQEGYSIFVVKGDLPDCEADQ | | LISDTYLALFLAQLQQEGYS |
| | | LLQMIRVQQMHRPKLIGEELAQ | | IFVVK |
| | | LKEQRVHKTDLERVLEANDGSG | | |
| | | MLDEDEEDLQRALALSRQEIDM | | |
| | | EDEEADLRRAIQLSMQGSSRNI | | |
| | | SQDMTQTSGTNLTSEELRKRRE | | |
| | | AYFEKQQQKQQQQGDL | | |
| | | SGQSSHPCERPATSSGALGSDL | | |
| | | GDAMSEEDMLQAAVTMSLETVR | | |
| | | NDLKTEGKK | | |
| JOS2_HUMAN | 89 | MSQAPGAQPSPPTVYHERQRLE | 197 | PTVYHERQRLELCAVHALNN |
| Josephin-2 | | LCAVHALNNVLQQQLFSQEAAD | | VLQQQLFSQEAADEICKRLA |
| | | EICKRLAPDSRLNPHRSLLGTG | | PDSRLNPHRSLLGTGNYDVN |
| | | NYDVNVIMAALQGLGLAAVWWD | | VIMAALQGLGLAAVWWDRRR |
| | | RRRPLSQLALPQVLGLILNLPS | | PLSQLALPQVLGLILNLPSP |
| | | PVSLGLLSLPLRRRHWVALRQV | | VSLGLLSLPLRRRHWVALRQ |
| | | DGVYYNLDSKLRAPEALGDEDG | | VDGVYYNLDSKLRAPEALGD |
| | | VRAFLAAALAQGLCEVLLVVTK | | EDGVRAFLAAALAQGLCEVL |
| | | EVEEKGSWLRTD | | LVV |
| JOS1_HUMAN | 90 | MSCVPWKGDKAKSESLELPQAA | 198 | PQAAPPQIYHEKQRRELCAL |
| Josephin-1 | | PPQIYHEKQRRELCALHALNNV | | HALNNVFQDSNAFTRDTLQE |
| | | FQDSNAFTRDTLQEIFQRLSPN | | IFQRLSPNTMVTPHKKSMLG |
| | | TMVTPHKKSMLGNGNYDVNVIM | | NGNYDVNVIMAALQTKGYEA |
| | | AALQTKGYEAVWWDKRRDVGVI | | VWWDKRRDVGVIALTNVMGF |
| | | ALTNVMGFIMNLPSSLCWGPLK | | IMNLPSSLCWGPLKLPLKRQ |
| | | LPLKRQHWICVREVGGAYYNLD | | HWICVREVGGAYYNLDSKLK |
| | | SKLKMPEWIGGESELRKELKHH | | MPEWIGGESELRKELKHHLR |
| | | LRGKNCELLLVVPEEVEAHQSW | | GKNCELLLVV |
| | | RTDV | | |
| ATX3L_HUMAN | 91 | MDFIFHEKQEGFLCAQHCLNNL | 199 | DFIFHEKQEGFLCAQHCLNN |
| taxin- | | LQGEYFSPVELASIAHQLDEEE | | LLQGEYFSPVELASIAHQLD |
| 3-like protein | | RMRMAEGGVTSEEYLAFLQQPS | | EEERMRMAEGGVTSEEYLAF |
| | | ENMDDTGFFSIQVISNALKEWG | | LQQPSENMDDTGFFSIQVIS |
| | | LEIIHENNPEYQKLGIDPINER | | NALKFWGLEIIHENNPEYQK |
| | | SFICNYKQHWFTIRKFGKHWFN | | LGIDPINERSFICNYKQHWF |
| | | LNSLLAGPELISDTCLANFLAR | | TIRKFGKHWENLNSLLAGPE |
| | | LQQQAYSVFVVKGDLPDCEADQ | | LISDTCLANFLARLQQQAYS |
| | | LLQIISVEEMDTPKLNGKKLVK | | VFVVK |
| | | QKEHRVYKTVLEKVSEESDESG | | |
| | | TSDQDEEDFQRALELSRQETNR | | |
| | | EDEHLRSTIELSMQGSSGNTSQ | | |
| | | DLPKTSCVTPASEQPKKIKEDY | | |
| | | FEKHQQEQKQQQQQSDLPGHSS | | |
| | | YLHERPTTSSRAIESDLSDDIS | | |
| | | EGTVQAAVDTILEIMRKNLKIK | | |
| | | GEK | | |
| MINY3_ | 92 | MSELTKELMELVWGTKSSPGLS | 200 | CRWTQGFVFSESEGSALEQF |
| HUMAN | | DTIFCRWTQGFVFSESEGSALE | | EGGPCAVIAPVQAFLLKKLL |
| Ubiquitin | | QFEGGPCAVIAPVQAFLLKKLL | | FSSEKSSWRDCSEEEQKELL |
| carboxyl- | | FSSEKSSWRDCSEEEQKELLCH | | CHTLCDILESACCDHSGSYC |
| terminal | | TLCDILESACCDHSGSYCLVSW | | LVSWLRGKTTEETASISGSP |
| hydrolase | | LRGKTTEETASISGSPAESSCQ | | AESSCQVEHSSALAVEELGE |
| MINDY-3 | | VEHSSALAVEELGFERFHALIQ | | ERFHALIQKRSFRSLPELKD |
| | | KRSFRSLPELKDAVLDQYSMWG | | AVLDQYSMWGNKFG |
| | | NKFGVLLFLYSVLLTKGIENIK | | VLLFLYSVLLTKGIENIKNE |
| | | NEIEDASEPLIDPVYGHGSQSL | | IEDASEPLIDPVYGHGSQSL |
| | | INLLLTGHAVSNVWDGDRECSG | | INLLLTGHAVSNVWDGDREC |
| | | MKLLGIHEQAAVGELTLMEALR | | SGMKLLGIHEQAAVGFLTLM |
| | | YCKVGSYLKSPKFPIWIVGSET | | EALRYCKVGSYLKSPKFPIW |
| | | HLTVFFAKDMALVA | | IVGSETHLTVFFAKDMALVA |
| | | PEAPSEQARRVFQTYDPEDNGE | | PEAPSEQARRVFQTYDPEDN |
| | | IPDSLLEDVMKALDLVSDPEYI | | GFIPDSLLEDVMKALDLVSD |
| | | NLMKNKLDPEGLGIILLGPFLQ | | PEYINLMKNKLDPEGLGIIL |
| | | EFFPDQGSSGPESFTVYHYNGL | | LGPFLQEFFPDQGSSGPESF |
| | | KQSNYNEKVMYVEGTAVVMGFE | | TVYHYNGLKQSNYNEKVMYV |
| | | DPMLQTDDTPIKRCLQTKWPYI | | EGTAVVMGFEDPMLQTDDTP |
| | | ELLWTTDRSPSLN | | IKRCLQTKWPYIELLWTTDR |
| | | | | SPSLN |
| MINY1_ | 93 | MEYHQPEDPAPGKAGTAEAVIP | 201 | YCVKWIPWKGEQTPIITQST |
| HUMAN | | ENHEVLAGPDEHPQDTDARDAD | | NGPCPLLAIMNILFLQWKVK |
| Ubiquitin | | GEAREREPADQALLPSQCGDNL | | LPPQKEVITSDELMAHLGNC |
| carboxyl- | | ESPLPEASSAPPGPTLGTLPEV | | LLSIKPQEKSEGLQLNFQQN |
| terminal | | ETIRACSMPQELPQSPRTRQPE | | VDDAMTVLPKLATGLDVNVR |
| hydrolase | | PDFYCVKWIPWKGEQTPIITQS | | FTGVSDFEYTPECSVEDLLG |
| MINDY-1 | | TNGPCPLLAIMNILFLQWKVKL | | IPLYHGWLVDPQSPEAVRAV |
| | | PPQKEVITSDELMAHLGNCLLS | | GKLSYNQLVERIITCKHSSD |
| | | IKPQEKSEGLQLNFQQNVDDAM | | TNLVTEGLIAEQFLETTAAQ |
| | | TVLPKLATGLDVNVRFTGVSDE | | LTYHGLCELTAAAKEGELSV |
| | | EYTPECSVEDLLGIPLYHGWLV | | FFRNNHESTMTKHKSHLYLL |
| | | DPQSPEAVRAVGKLSYNQLVER | | VTDQGFLQEEQVVWESLHNV |
| | | IITCKHSSDTNLVTEGLIAEQF | | DGDSCFCDSDFHLSHSLGKG |
| | | LETTAAQLTYHGLC | | PGAEGGSGSPETQLQVDQDY |
| | | ELTAAAKEGELSVFFRNNHEST | | LIALSLQQQQPRGPLGLTDL |
| | | MTKHKSHLYLLVTDQGELQEEQ | | ELAQQLQQEEYQQQQAAQPV |
| | | VVWESLHNVDGDSCFCDSDFHL | | RMRTRVLSLQGRGATSGRPA |
| | | SHSLGKGPGAEGGSGSPETQLQ | | GERRQRPKHESDCILL |
| | | VDQDYLIALSLQQQQPRGPLGL | | |
| | | TDLELAQQLQQEEYQQQQAAQP | | |
| | | VRMRTRVLSLQGRGATSGRPAG | | |
| | | ERRQRPKHESDCILL | | |
| MINY2_ | 94 | MESSPESLQPLEHGVAAGPASG | 202 | YHIKWIQWKEENTPIITQNE |
| HUMAN | | TGSSQEGLQETRLAAGDGPGVW | | NGPCPLLAILNVLLLAWKVK |
| Ubiquitin | | AAETSGGNGLGAAAARRSLPDS | | LPPMMEIITAEQLMEYLGDY |
| carboxyl- | | ASPAGSPEVPGPCSSSAGLDLK | | MLDAKPKEISEIQRLNYEQN |
| terminal | | DSGLESPAAAEAPLRGQYKVTA | | MSDAMAILHKLQTGLDVNVR |
| hydrolase | | SPETAVAGVGHELGTAGDAGAR | | FTGVRVFEYTPECIVEDLLD |
| MINDY-2 | | PDLAGTCQAELTAAGSEEPSSA | | IPLYHGWLVDPQIDDIVKAV |
| | | GGLSSSCSDPSPPGESPSLDSL | | GNCSYNQLVEKIISCKQSDN |
| | | ESFSNLHSFPSSCEENSEEGAE | | SELVSEGEVAEQFLNNTATQ |
| | | NRVPEEEEGAAVLPGAVPLCKE | | LTYHGLCELTSTVQEGELCV |
| | | EEGEETAQVLAASKERFPGQSV | | FFRNNHFSTMTKYKGQLYLL |
| | | YHIKWIQWKEENTPIITQNENG | | VTDQGFLTEEKVVWESLHNV |
| | | PCPLLAILNVLLLAWKVKLPPM | | DGDGNFCDSEFHLRPPSDPE |
| | | MEIITAEQLMEYLG | | TVYKGQQDQIDQDYLMALSL |
| | | DYMLDAKPKEISEIQRLNYEQN | | QQEQQSQEINWEQIPEGISD |
| | | MSDAMAILHKLQTGLDVNVRFT | | LELAKKLQEEEDRRASQYYQ |
| | | GVRVFEYTPECIVEDLLDIPLY | | EQEQAAAAAAAASTQAQQGQ |
| | | HGWLVDPQIDDIVKAVGNCSYN | | PAQASPSSGRQSGNSERKRK |
| | | QLVEKIISCKQSDNSELVSEGE | | EPREKDKEKEKEKNSCVIL |
| | | VAEQFLNNTATQLTYHGLCELT | | |
| | | STVQEGELCVFERNNHFSTMTK | | |
| | | YKGQLYLLVTDQGFLTEEKVVW | | |
| | | ESLHNVDGDGNFCDSEFHLRPP | | |
| | | SDPETVYKGQQDQIDQDYLMAL | | |
| | | SLQQEQQSQEINWEQIPEGISD | | |
| | | LELAKKLQEEEDRRASQYYQEQ | | |
| | | EQAAAAAAAASTQAQQGQPAQA | | |
| | | SPSSGRQSGNSERKRKEPREKD | | |
| | | KEKEKEKNSCVIL | | |
| MINY4_ | 95 | MDSLFVEEVAASLVREFLSRKG | 203 | FCCFNEEWKLQSFSFSNTAS |
| HUMAN | | LKKTCVTMDQERPRSDLSINNR | | LKYGIVQNKGGPCGVLAAVQ |
| Probable | | NDLRKVLHLEFLYKENKAKENP | | GCVLQKLLFEGDSKADCAQG |
| ubiquitin | | LKTSLELITRYFLDHEGNTANN | | LQPSDAHRTRCLVLALADIV |
| carboxyl- | | FTQDTPIPALSVPKKNNKVPSR | | WRAGGRERAVVALASRTQQF |
| terminal | | CSETTLVNIYDLSDEDAGWRTS | | SPTGKYKADGVLETLTLHSL |
| hydrolase | | LSETSKARHDNLDGDVLGNFVS | | TCYEDLVTFLQQSIHQFEVG |
| MINDY-4 | | SKRPPHKSKPMQTVPGETPVLT | | PYGCILLTLSAILSRSTELI |
| | | SAWEKIDKLHSEPSLDVKRMGE | | RQDFDVPTSHLIGAHGYCTQ |
| | | NSRPKSGLIVRGMMSGPIASSP | | ELVNLLLTGKAVSNVENDVV |
| | | QDSFHRHYLRRSSPSSSSTQPQ | | ELDSGDGNITLLRGIAARSD |
| | | EESRKVPELFVCTQQDILASSN | | IGFLSLFEHYNMCQVGCFLK |
| | | SSPSRTSLGQLSELTVERQKTT | | TPRFPIWVVCSESHESILES |
| | | ASSPPHLPSKRLPP | | LQPGLLRDWRTERLEDLYYY |
| | | WDRARPRDPSEDTPAVDGSTDT | | DGLANQQEQIRLTIDTTQTI |
| | | DRMPLKLYLPGGNSRMTQERLE | | SEDTDNDLVPPLELCIRTKW |
| | | RAFKRQGSQPAPVRKNQLLPSD | | KGASVNWNGSDPIL |
| | | KVDGELGALRLEDVEDELIREE | | |
| | | VILSPVPSVLKLQTASKPIDLS | | |
| | | VAKEIKTLLFGSSFCCENEEWK | | |
| | | LQSFSFSNTASLKYGIVQNKGG | | |
| | | PCGVLAAVQGCVLQKLLFEGDS | | |
| | | KADCAQGLQPSDAHRTRCLVLA | | |
| | | LADIVWRAGGRERAVVALASRT | | |
| | | QQFSPTGKYKADGVLETLTLHS | | |
| | | LTCYEDLVTFLQQSIHQFEVGP | | |
| | | YGCILLTLSAILSRSTELIRQD | | |
| | | FDVPTSHLIGAHGY | | |
| | | CTQELVNLLLTGKAVSNVENDV | | |
| | | VELDSGDGNITLLRGIAARSDI | | |
| | | GFLSLFEHYNMCQVGCFLKTPR | | |
| | | FPIWVVCSESHFSILFSLQPGL | | |
| | | LRDWRTERLEDLYYYDGLANQQ | | |
| | | EQIRLTIDTTQTISEDTDNDLV | | |
| | | PPLELCIRTKWKGASVNWNGSD | | |
| | | PIL | | |
| STABP_HUMAN | 96 | MSDHGDVSLPPEDRVRALSQLG | 204 | VVPGRLCPQFLQLASANTAR |
| STAM- | | SAVEVNEDIPPRRYFRSGVEII | | GVETCGILCGKLMRNEFTIT |
| binding | | RMASIYSEEGNIEHAFILYNKY | | HVLIPKQSAGSDYCNTENEE |
| protein | | ITLFIEKLPKHRDYKSAVIPEK | | ELFLIQDQQGLITLGWIHTH |
| | | KDTVKKLKEIAFPKAEELKAEL | | PTQTAFLSSVDLHTHCSYQM |
| | | LKRYTKEYTEYNEEKKKEAEEL | | MLPESVAIVCSPKFQETGFF |
| | | ARNMAIQQELEKEKQRVAQQKQ | | KLTDHGLEEISSCRQKGFHP |
| | | QQLEQEQFHAFEEMIRNQELEK | | HSKDPPLFCSCSHVTVVDRA |
| | | ERLKIVQEFGKVDPGLGGPLVP | | VTITDLR |
| | | DLEKPSLDVFPTLTVSSIQPSD | | |
| | | CHTTVRPAKPPVVDRSLKPGAL | | |
| | | SNSESIPTIDGLRHVVVPGRLC | | |
| | | PQFLQLASANTARGVETCGILC | | |
| | | GKLMRNEFTITHVL | | |
| | | IPKQSAGSDYCNTENEEELFLI | | |
| | | QDQQGLITLGWIHTHPTQTAFL | | |
| | | SSVDLHTHCSYQMMLPESVAIV | | |
| | | CSPKFQETGFFKLTDHGLEEIS | | |
| | | SCRQKGFHPHSKDPPLFCSCSH | | |
| | | VTVVDRAVTITDLR | | |
| MPND_HUMAN | 97 | MAAPEPLSPAGGAGEEAPEEDE | 205 | VAVSSNVLFLLDFHSHLTRS |
| MPN | | DEAEAEDPERPNAGAGGGRSGG | | EVVGYLGGRWDVNSQMLTVL |
| domain- | | GGSSVSGGGGGGGAGAGGCGGP | | RAFPCRSRLGDAETAAAIEE |
| containing | | GGALTRRAVTLRVLLKDALLEP | | EIYQSLFLRGLSLVGWYHSH |
| protein | | GAGVLSIYYLGKKFLGDLQPDG | | PHSPALPSLQDIDAQMDYQL |
| | | RIMWQETGQTENSPSAWATHCK | | RLQGSSNGFQPCLALLCSPY |
| | | KLVNPAKKSGCGWASVKYKGQK | | YSGNPGPESKISPFWVMPPP |
| | | LDKYKATWLRLHQLHTPATAAD | | EMLLVEFYKGSPDLVRLQEP |
| | | ESPASEGEEEELLMEEEEEDVL | | WSQEHTYLDKLKISLASRTP |
| | | AGVSAEDKSRRPLGKSPSEPAH | | KDQSLCHVLEQVCGVLKQGS |
| | | PEATTPGKRVDSKIRVPVRYCM | | |
| | | LGSRDLARNPHTLVEVTSFAAI | | |
| | | NKFQPFNVAVSSNVLFLLDFHS | | |
| | | HLTRSEVVGYLGGR | | |
| | | WDVNSQMLTVLRAFPCRSRLGD | | |
| | | AETAAAIEEEIYQSLFLRGLSL | | |
| | | VGWYHSHPHSPALPSLQDIDAQ | | |
| | | MDYQLRLQGSSNGFQPCLALLC | | |
| | | SPYYSGNPGPESKISPFWVMPP | | |
| | | PEMLLVEFYKGSPDLVRLQEPW | | |
| | | SQEHTYLDKLKISLASRTPKDQ | | |
| | | SLCHVLEQVCGVLKQGS | | |
| EMC9_HUMAN | 98 | MGEVEISALAYVKMCLHAARYP | 206 | ALAYVKMCLHAARYPHAAVN |
| ER | | HAAVNGLFLAPAPRSGECLCLT | | GLFLAPAPRSGECLCLTDCV |
| membrane | | DCVPLFHSHLALSVMLEVALNQ | | PLFHSHLALSVMLEVALNQV |
| protein | | VDVWGAQAGLVVAGYYHANAAV | | DVWGAQAGLVVAGYYHANAA |
| complex | | NDQSPGPLALKIAGRIAEFFPD | | VNDQSPGPLALKIAGRIAEF |
| subunit 9 | | AVLIMLDNQKLVPQPRVPPVIV | | FPDAVLIMLDNQKLVPQPRV |
| | | LENQGLRWVPKDKNLVMWRDWE | | PPVIVLENQGLRWVPKDKNL |
| | | ESRQMVGALLEDRAHQHLVDED | | VMWRDWEESRQMVGALLEDR |
| | | CHLDDIRQDWTNQRLNTQITQW | | AHQHLVDEDCHLDDIRQDWT |
| | | VGPTNGNGNA | | NQRLNTQITQWVGPTNGNGN |
| | | | | A |
| PSDE_HUMAN | 99 | MDRLLRLGGGMPGLGQGPPTDA | 207 | QVYISSLALLKMLKHGRAGV |
| 26S | | PAVDTAEQVYISSLALLKMLKH | | PMEVMGLMLGEFVDDYTVRV |
| proteasome | | GRAGVPMEVMGLMLGEFVDDYT | | IDVFAMPQSGTGVSVEAVDP |
| non-ATPase | | VRVIDVFAMPQSGTGVSVEAVD | | VFQAKMLDMLKQTGRPEMVV |
| regulatory | | PVFQAKMLDMLKQTGRPEMVVG | | GWYHSHPGFGCWLSGVDINT |
| subunit 14 | | WYHSHPGFGCWLSGVDINTQQS | | QQSFEALSERAVAVVVDPIQ |
| | | FEALSERAVAVVVDPIQSVKGK | | SVKGKVVIDAFRLINANMMV |
| | | VVIDAFRLINANMMVLGHEPRQ | | LGHEPRQTTSNLGHLNKPSI |
| | | TTSNLGHLNKPSIQALIHGLNR | | QALIHGLNRHYYSITINYRK |
| | | HYYSITINYRKNELEQKMLLNL | | NELEQKMLLNLHKKSWMEGL |
| | | HKKSWMEGLTLQDYSEHCKHNE | | TLQDYSEHCKHNESVVKEML |
| | | SVVKEMLELAKNYNKAVEEEDK | | ELAKNYNKAVEEEDKMTPEQ |
| | | MTPEQLAIKNVGKQDPKRHLEE | | LAIKNVGKQDPKRHLEEHVD |
| | | HVDVLMTSNIVQCLAAMLDTVV | | VLMTSNIVQCLAAMLDTVVE |
| | | FK | | K |
| MYSM1_HUMAN | 100 | MAAEEADVDIEGDVVAAAGAQP | 208 | QVKVASEALLIMDLHAHVSM |
| MHistone | | GSGENTASVLQKDHYLDSSWRT | | AEVIGLLGGRYSEVDKVVEV |
| H2A | | ENGLIPWTLDNTISEENRAVIE | | CAAEPCNSLSTGLQCEMDPV |
| deubiquitinase | | KMLLEEEYYLSKKSQPEKVWLD | | SQTQASETLAVRGESVIGWY |
| MYSM1 | | QKEDDKKYMKSLQKTAKIMVHS | | HSHPAFDPNPSLRDIDTQAK |
| | | PTKPASYSVKWTIEEKELFEQG | | YQSYFSRGGAKFIGMIVSPY |
| | | LAKFGRRWTKISKLIGSRTVLQ | | NRNNPLPYSQITCLVISEEI |
| | | VKSYARQYFKNKVKCGLDKETP | | SPDGSYRLPYKFEVQQMLEE |
| | | NQKTGHNLQVKNEDKGTKAWTP | | PQWGLVFEKTRWIIEKYRLS |
| | | SCLRGRADPNLNAVKIEKLSDD | | HSSVPMDKIFRRDSDLTCLQ |
| | | EEVDITDEVDELSSQTPQKNSS | | KLLECMRKTLSKVTNCFMAE |
| | | SDLLLDEPNSKMHETNQGEFIT | | EFLTEIENLFLSNYKSNQEN |
| | | SDSQEALESKSSRGCLQNEKQD | | GVTEENCTKELLM |
| | | ETLSSSEITLWTEK | | |
| | | QSNGDKKSIELNDQKENELIKN | | |
| | | CNKHDGRGIIVDARQLPSPEPC | | |
| | | EIQKNLNDNEMLFHSCQMVEES | | |
| | | HEEEELKPPEQEIEIDRNIIQE | | |
| | | EEKQAIPEFFEGRQAKTPERYL | | |
| | | KIRNYILDQWEICKPKYLNKTS | | |
| | | VRPGLKNCGDVNCIGRIHTYLE | | |
| | | LIGAINFGCEQAVYNRPQTVDK | | |
| | | VRIRDRKDAVEAYQLAQRLQSM | | |
| | | RTRRRRVRDPWGNWCDAKDLEG | | |
| | | QTFEHLSAEELAKRREEEKGRP | | |
| | | VKSLKVPRPTKSSFDPFQLIPC | | |
| | | NFFSEEKQEPFQVKVASEALLI | | |
| | | MDLHAHVSMAEVIG | | |
| | | LLGGRYSEVDKVVEVCAAEPCN | | |
| | | SLSTGLQCEMDPVSQTQASETL | | |
| | | AVRGFSVIGWYHSHPAFDPNPS | | |
| | | LRDIDTQAKYQSYFSRGGAKFI | | |
| | | GMIVSPYNRNNPLPYSQITCLV | | |
| | | ISEEISPDGSYRLPYKFEVQQM | | |
| | | LEEPQWGLVFEKTRWIIEKYRL | | |
| | | SHSSVPMDKIFRRDSDLTCLQK | | |
| | | LLECMRKTLSKVINCFMAEEFL | | |
| | | TEIENLELSNYKSNQENGVTEE | | |
| | | NCTKELLM | | |
| ABRX2_HUMAN | 101 | MAASISGYTFSAVCFHSANSNA | 209 | AVCFHSANSNADHEGELLGE |
| MBRISC | | DHEGELLGEVRQEETFSISDSQ | | VRQEETFSISDSQISNTEFL |
| complex | | ISNTEFLQVIEIHNHQPCSKLF | | QVIEIHNHQPCSKLESFYDY |
| subunit | | SFYDYASKVNEESLDRILKDRR | | ASKVNEESLDRILKDRRKKV |
| Abraxas 2 | | KKVIGWYRFRRNTQQQMSYREQ | | IGWYRFRRNTQQQMSYREQV |
| | | VLHKQLTRILGVPDLVELLESF | | LHKQLTRIL |
| | | ISTANNSTHALEYVLERPNRRY | | GVPDLVELLESFISTANNST |
| | | NQRISLAIPNLGNTSQQEYKVS | | HALEYVLERPNRRYNQRISL |
| | | SVPNTSQSYAKVIKEHGTDFED | | AIPNLGNTSQQEYKVSSVPN |
| | | KDGVMKDIRAIYQVYNALQEKV | | TSQSYAKVIKEHGTDFFDKD |
| | | QAVCADVEKSERVVESCQAEVN | | GVMKDIRAIYQVYNALQEKV |
| | | KLRRQITQRKNEKEQERRLQQA | | QAVCADVEKSERVVESCQAE |
| | | VLSRQMPSESLDPAFSPRMPSS | | VNKLRRQITQRKNEKEQERR |
| | | GFAAEGRSTLGDAE | | LQQAVLSRQMPSESLDPAFS |
| | | ASDPPPPYSDFHPNNQESTLSH | | PRMPSSGFAAEGRSTLGDAE |
| | | SRMERSVEMPRPQAVGSSNYAS | | ASDPPPPYSDFHPNNQESTL |
| | | TSAGLKYPGSGADLPPPQRAAG | | SHSRMERSVEMPRPQAVGSS |
| | | DSGEDSDDSDYENLIDPTEPSN | | NYASTSAGLKYPGSGADLPP |
| | | SEYSHSKDSRPMAHPDEDPRNT | | PQRAAGDSGEDSDDSDYENL |
| | | QTSQI | | IDPTEPSNSEYSHSKDSRPM |
| | | | | AHPDEDPRNTQTSQI |
| PRP8_HUMAN | 102 | MAGVFPYRGPGNPVPGPLAPLP | 210 | FNPRTGQLELKIIHTSVWAG |
| Pre-mRNA- | | DYMSEEKLQEKARKWQQLQAKR | | QKRLGQLAKWKTAEEVAALI |
| processing- | | YAEKRKFGFVDAQKEDMPPEHV | | RSLPVEEQPKQIIVTRKGML |
| splicing factor | | RKIIRDHGDMTNRKFRHDKRVY | | DPLEVHLLDEPNIVIKGSEL |
| 8 | | LGALKYMPHAVLKLLENMPMPW | | QLPFQACLKVEKFGDLILKA |
| | | EQIRDVPVLYHITGAISFVNEI | | TEPQMVLENLYDDWLKTISS |
| | | PWVIEPVYISQWGSMWIMMRRE | | YTAFSRLILILRALHVNNDR |
| | | KRDRRHFKRMRFPPEDDEEPPL | | AKVILKPDKTTITEPHHIWP |
| | | DYADNILDVEPLEAIQLELDPE | | TLTDEEWIKVEVQLKDLILA |
| | | EDAPVLDWFYDHQPLRDSRKYV | | DYGKKNNVNVASLTQSEIRD |
| | | NGSTYQRWQFTLPMMSTLYRLA | | IILGMEISAPSQQRQQIAEI |
| | | NQLLTDLVDDNYFYLFDLKAFF | | EKQTKEQSQLTATQTRTVNK |
| | | TSKALNMAIPGGPKFEPLVRDI | | HGDEIITSTTSNYETQTFSS |
| | | NLQDEDWNEFNDIN | | KTEWRVRAISAANLHLRTNH |
| | | KIIIRQPIRTEYKIAFPYLYNN | | IYVSSDDIKETGYTYILPKN |
| | | LPHHVHLTWYHTPNVVFIKTED | | VLKKFICISDLRAQIAGYLY |
| | | PDLPAFYFDPLINPISHRHSVK | | GVSPPDNPQVKEIRCIVMVP |
| | | SQEPLPDDDEEFELPEFVEPFL | | QWGTHQTVHLPGQLPQHEYL |
| | | KDTPLYTDNTANGIALLWAPRP | | KEMEPLGWIHTQPNESPQLS |
| | | FNLRSGRTRRALDIPLVKNWYR | | PQDVTTHAKIMADNPSWDGE |
| | | EHCPAGQPVKVRVSYQKLLKYY | | KTIIITCSFTPGSCTLTAYK |
| | | VLNALKHRPPKAQKKRYLFRSF | | LTPSGYEWGRQNTDKGNNPK |
| | | KATKFFQSTKLDWVEVGLQVCR | | GYLPSHYERVQMLLSDRFLG |
| | | QGYNMLNLLIHRKNLNYLHLDY | | FFMVPAQSSWNYNFMGVRHD |
| | | NFNLKPVKTLTTKERKKSREGN | | PNMKYELQLANPKEFYHEVH |
| | | AFHLCREVLRLTKLVVDSHVQY | | RPSHFLNFALLQEGEVYSAD |
| | | RLGNVDAFQLADGLQYIFAHVG | | REDLYA |
| | | QLTGMYRYKYKLMR | | |
| | | QIRMCKDLKHLIYYRFNTGPVG | | |
| | | KGPGCGFWAAGWRVWLFFMRGI | | |
| | | TPLLERWLGNLLARQFEGRHSK | | |
| | | GVAKTVTKQRVESHFDLELRAA | | |
| | | VMHDILDMMPEGIKQNKARTIL | | |
| | | QHLSEAWRCWKANIPWKVPGLP | | |
| | | TPIENMILRYVKAKADWWTNTA | | |
| | | HYNRERIRRGATVDKTVCKKNL | | |
| | | GRLTRLYLKAEQERQHNYLKDG | | |
| | | PYITAEEAVAVYTTTVHWLESR | | |
| | | RFSPIPFPPLSYKHDTKLLILA | | |
| | | LERLKEAYSVKSRLNQSQREEL | | |
| | | GLIEQAYDNPHEALSRIKRHLL | | |
| | | TQRAFKEVGIEFMD | | |
| | | LYSHLVPVYDVEPLEKITDAYL | | |
| | | DQYLWYEADKRRLFPPWIKPAD | | |
| | | TEPPPLLVYKWCQGINNLQDVW | | |
| | | ETSEGECNVMLESRFEKMYEKI | | |
| | | DLTLLNRLLRLIVDHNIADYMT | | |
| | | AKNNVVINYKDMNHTNSYGIIR | | |
| | | GLQFASFIVQYYGLVMDLLVLG | | |
| | | LHRASEMAGPPQMPNDFLSFQD | | |
| | | IATEAAHPIRLFCRYIDRIHIF | | |
| | | FRFTADEARDLIQRYLTEHPDP | | |
| | | NNENIVGYNNKKCWPRDARMRL | | |
| | | MKHDVNLGRAVFWDIKNRLPRS | | |
| | | VTTVQWENSFVSVYSKDNPNLL | | |
| | | FNMCGFECRILPKC | | |
| | | RTSYEEFTHKDGVWNLQNEVTK | | |
| | | ERTAQCFLRVDDESMQRFHNRV | | |
| | | RQILMASGSTTFTKIVNKWNTA | | |
| | | LIGLMTYFREAVVNTQELLDLL | | |
| | | VKCENKIQTRIKIGLNSKMPSR | | |
| | | FPPVVFYTPKELGGLGMLSMGH | | |
| | | VLIPQSDLRWSKQTDVGITHER | | |
| | | SGMSHEEDQLIPNLYRYIQPWE | | |
| | | SEFIDSQRVWAEYALKRQEAIA | | |
| | | QNRRLTLEDLEDSWDRGIPRIN | | |
| | | TLFQKDRHTLAYDKGWRVRTDE | | |
| | | KQYQVLKQNPFWWTHQRHDGKL | | |
| | | WNLNNYRTDMIQALGGVEGILE | | |
| | | HTLFKGTYFPTWEG | | |
| | | LEWEKASGFEESMKWKKLTNAQ | | |
| | | RSGLNQIPNRRFTLWWSPTINR | | |
| | | ANVYVGFQVQLDLTGIFMHGKI | | |
| | | PTLKISLIQIFRAHLWQKIHES | | |
| | | IVMDLCQVEDQELDALEIETVQ | | |
| | | KETIHPRKSYKMNSSCADILLE | | |
| | | ASYKWNVSRPSLLADSKDVMDS | | |
| | | TTTQKYWIDIQLRWGDYDSHDI | | |
| | | ERYARAKFLDYTTDNMSIYPSP | | |
| | | TGVLIAIDLAYNLHSAYGNWFP | | |
| | | GSKPLIQQAMAKIMKANPALYV | | |
| | | LRERIRKGLQLYSSEPTEPYLS | | |
| | | SQNYGELFSNQIIWFVDDTNVY | | |
| | | RVTIHKTFEGNLTT | | |
| | | KPINGAIFIFNPRTGQLELKII | | |
| | | HTSVWAGQKRLGQLAKWKTAEE | | |
| | | VAALIRSLPVEEQPKQIIVTRK | | |
| | | GMLDPLEVHLLDFPNIVIKGSE | | |
| | | LQLPFQACLKVEKFGDLILKAT | | |
| | | EPQMVLENLYDDWLKTISSYTA | | |
| | | FSRLILILRALHVNNDRAKVIL | | |
| | | KPDKTTITEPHHIWPTLTDEEW | | |
| | | IKVEVQLKDLILADYGKKNNVN | | |
| | | VASLTQSEIRDIILGMEISAPS | | |
| | | QQRQQIAEIEKQTKEQSQLTAT | | |
| | | QTRTVNKHGDEIITSTTSNYET | | |
| | | QTFSSKTEWRVRAISAANLHLR | | |
| | | TNHIYVSSDDIKET | | |
| | | GYTYILPKNVLKKFICISDLRA | | |
| | | QIAGYLYGVSPPDNPQVKEIRC | | |
| | | IVMVPQWGTHQTVHLPGQLPQH | | |
| | | EYLKEMEPLGWIHTQPNESPQL | | |
| | | SPQDVTTHAKIMADNPSWDGEK | | |
| | | TIIITCSFTPGSCTLTAYKLTP | | |
| | | SGYEWGRQNTDKGNNPKGYLPS | | |
| | | HYERVQMLLSDRFLGFFMVPAQ | | |
| | | SSWNYNFMGVRHDPNMKYELQL | | |
| | | ANPKEFYHEVHRPSHELNFALL | | |
| | | QEGEVYSADREDLYA | | |
| NPL4_HUMAN | 103 | MAESIIIRVQSPDGVKRITATK | 211 | QPSAITLNRQKYRHVDNIMF |
| Membrane | | RETAATFLKKVAKEFGFQNNGE | | ENHTVADRFLDFWRKTGNQH |
| protein | | SVYINRNKTGEITASSNKSLNL | | FGYLYGRYTEHKDIPLGIRA |
| localization | | LKIKHGDLLFLFPSSLAGPSSE | | EVAAIYEPPQIGTQNSLELL |
| protein 4 | | METSVPPGFKVEGAPNVVEDEI | | EDPKAEVVDEIAAKLGLRKV |
| homolog | | DQYLSKQDGKIYRSRDPQLCRH | | GWIFTDLVSEDTRKGTVRYS |
| | | GPLGKCVHCVPLEPFDEDYLNH | | RNKDTYFLSSEECITAGDFQ |
| | | LEPPVKHMSFHAYIRKLTGGAD | | NKHPNMCRLSPDGHFGSKFV |
| | | KGKFVALENISCKIKSGCEGHL | | TAVATGGPDNQVHFEGYQVS |
| | | PWPNGICTKCQPSAITLNRQKY | | NQCMALVRDECLLPCKDAPE |
| | | RHVDNIMFENHTVADRELDEWR | | LGYAKESSSEQYVPDVFYKD |
| | | KTGNQHFGYLYGRYTEHKDIPL | | VDKFGNEITQLARPLPVEYL |
| | | GIRAEVAAIYEPPQIGTQNSLE | | IIDITTTFPKDPVYTFSISQ |
| | | LLEDPKAEVVDEIA | | NPFPIENRDVLGETQDFHSL |
| | | AKLGLRKVGWIFTDLVSEDTRK | | ATYLSQNTSSVELDTISDFH |
| | | GTVRYSRNKDTYFLSSEECITA | | LLLFLVTNEVMPLQDSISLL |
| | | GDFQNKHPNMCRLSPDGHFGSK | | LEAVRTRNEELAQTWKRSEQ |
| | | FVTAVATGGPDNQVHFEGYQVS | | WATIEQLCSTVGGQLPGLHE |
| | | NQCMALVRDECLLPCKDAPELG | | YGAVGGSTHTATAAMWACQH |
| | | YAKESSSEQYVPDVFYKDVDKF | | CTFMNQPGTGHCEMCSLPRT |
| | | GNEITQLARPLPVEYLIIDITT | | |
| | | TFPKDPVYTFSISQNPFPIENR | | |
| | | DVLGETQDFHSLATYLSQNTSS | | |
| | | VELDTISDFHLLLFLVTNEVMP | | |
| | | LQDSISLLLEAVRTRNEELAQT | | |
| | | WKRSEQWATIEQLCSTVGGQLP | | |
| | | GLHEYGAVGGSTHTATAAMWAC | | |
| | | QHCTFMNQPGTGHCEMCSLPRT | | |
| EMC8_HUMAN | 104 | MPGVKLTTQAYCKMVLHGAKYP | 212 | TQAYCKMVLHGAKYPHCAVN |
| ER | | HCAVNGLLVAEKQKPRKEHLPL | | GLLVAEKQKPRKEHLPLGGP |
| membrane | | GGPGAHHTLFVDCIPLFHGTLA | | GAHHTLFVDCIPLFHGTLAL |
| protein | | LAPMLEVALTLIDSWCKDHSYV | | APMLEVALTLIDSWCKDHSY |
| complex | | IAGYYQANERVKDASPNQVAEK | | VIAGYYQANERVKDASPNQV |
| subunit 8 | | VASRIAEGFSDTALIMVDNTKF | | AEKVASRIAEGFSDTALIMV |
| | | TMDCVAPTIHVYEHHENRWRCR | | DNTKFTMDCVAPTIHVYEHH |
| | | DPHHDYCEDWPEAQRISASLLD | | ENRWRCRDPHHDYCEDWPEA |
| | | SRSYETLVDFDNHLDDIRNDWT | | QRISASLLDSRSYETLVDED |
| | | NPEINKAVLHLC | | NHLDDIRNDWTNPEINKAVL |
| | | | | HLC |
| ABRX1_ | 105 | MEGESTSAVLSGFVLGALAFQH | 213 | GFVLGALAFQHLNTDSDTEG |
| HUMAN | | LNTDSDTEGELLGEVKGEAKNS | | FLLGEVKGEAKNSITDSQMD |
| BRCA1-A | | ITDSQMDDVEVVYTIDIQKYIP | | DVEVVYTIDIQKYIPCYQLF |
| complex | | CYQLFSFYNSSGEVNEQALKKI | | SFYNSSGEVNEQALKKILSN |
| subunit | | LSNVKKNVVGWYKERRHSDQIM | | VKKNVVGWYKFRRHSDQIMT |
| Abraxas 1 | | TFRERLLHKNLQEHFSNQDLVE | | FRERLLHKNLQEHFSNQDLV |
| | | LLLTPSIITESCSTHRLEHSLY | | FLLLTPSIITESCSTHRLEH |
| | | KPQKGLFHRVPLVVANLGMSEQ | | SLYKPQKGLFHRVPLVVANL |
| | | LGYKTVSGSCMSTGFSRAVQTH | | GMSEQLGYKTVSGSCMSTGF |
| | | SSKFFEEDGSLKEVHKINEMYA | | SRAVQTHSSKFFEEDGSLKE |
| | | SLQEELKSICKKVEDSEQAVDK | | VHKINEMYASLQEELKSICK |
| | | LVKDVNRLKREIEKRRGAQIQA | | KVEDSEQAVDKLVKDVNRLK |
| | | AREKNIQKDPQENIFLCQALRT | | REIEKRRGAQIQAAREKNIQ |
| | | FFPNSEFLHSCVMS | | KDPQENIFLCQALRTFFPNS |
| | | LKNRHVSKSSCNYNHHLDVVDN | | EFLHSCVMSLKNRHVSKSSC |
| | | LTLMVEHTDIPEASPASTPQII | | NYNHHLDVVDNLTLMVEHTD |
| | | KHKALDLDDRWQFKRSRLLDTQ | | IPEASPASTPQIIKHKALDL |
| | | DKRSKADTGSSNQDKASKMSSP | | DDRWQFKRSRLLDTQDKRSK |
| | | ETDEEIEKMKGFGEYSRSPTF | | ADTGSSNQDKASKMSSPETD |
| | | | | EEIEKMKGFGEYSRSPTF |
| STALP_HUMAN | 106 | MDQPFTVNSLKKLAAMPDHTDV | 214 | VVLPEDLCHKELQLAESNTV |
| AMSH- | | SLSPEERVRALSKLGCNITISE | | RGIETCGILCGKLTHNEFTI |
| like protease | | DITPRRYFRSGVEMERMASVYL | | THVIVPKQSAGPDYCDMENV |
| | | EEGNLENAFVLYNKFITLFVEK | | EELFNVQDQHDLLTLGWIHT |
| | | LPNHRDYQQCAVPEKQDIMKKL | | HPTQTAFLSSVDLHTHCSYQ |
| | | KEIAFPRTDELKNDLLKKYNVE | | LMLPEAIAIVCSPKHKDTGI |
| | | YQEYLQSKNKYKAEILKKLEHQ | | FRLTNAGMLEVSACKKKGFH |
| | | RLIEAERKRIAQMRQQQLESEQ | | PHTKEPRLFSICKHVLVKDI |
| | | FLFFEDQLKKQELARGQMRSQQ | | KIIVLDLR |
| | | TSGLSEQIDGSALSCFSTHQNN | | |
| | | SLLNVFADQPNKSDATNYASHS | | |
| | | PPVNRALTPAATLSAVQNLVVE | | |
| | | GLRCVVLPEDLCHKELQLAESN | | |
| | | TVRGIETCGILCGK | | |
| | | LTHNEFTITHVIVPKQSAGPDY | | |
| | | CDMENVEELFNVQDQHDLLTLG | | |
| | | WIHTHPTQTAFLSSVDLHTHCS | | |
| | | YQLMLPEAIAIVCSPKHKDTGI | | |
| | | FRLTNAGMLEVSACKKKGFHPH | | |
| | | TKEPRLESICKHVLVKDIKIIV | | |
| | | LDLR | | |
| CSN6_HUMAN | 107 | MAAAAAAAAATNGTGGSSGMEV | 215 | VALHPLVILNISDHWIRMRS |
| COP9 | | DAAVVPSVMACGVTGSVSVALH | | QEGRPVQVIGALIGKQEGRN |
| signalosome | | PLVILNISDHWIRMRSQEGRPV | | IEVMNSFELLSHTVEEKIII |
| complex | | QVIGALIGKQEGRNIEVMNSFE | | DKEYYYTKEEQFKQVFKELE |
| subunit 6 | | LLSHTVEEKIIIDKEYYYTKEE | | FLGWYTTGGPPDPSDIHVHK |
| | | QFKQVFKELEFLGWYTTGGPPD | | QVCEIIESPLFLKLNPMTKH |
| | | PSDIHVHKQVCEIIESPLFLKL | | TDLPVSVFESVIDIINGEAT |
| | | NPMTKHTDLPVSVFESVIDIIN | | MLFAELTYTLATEEAERIGV |
| | | GEATMLFAELTYTLATEEAERI | | DHVARMTATGSGENSTVAEH |
| | | GVDHVARMTATGSGENSTVAEH | | LIAQHSAIKMLHSRVKLILE |
| | | LIAQHSAIKMLHSRVKLILEYV | | YVKASEAGEVPENHEILREA |
| | | KASEAGEVPENHEILREAYALC | | YALCHCLPVLSTDKFKTDFY |
| | | HCLPVLSTDKFKTDFYDQCNDV | | DQCNDVGLMAYLGTITKTCN |
| | | GLMAYLGTITKTCNTMNQFVNK | | TMNQFVNKFNVLYDRQGIGR |
| | | FNVLYDRQGIGRRMRGLFF | | RMRGLFF |
| EIF3F_ | 108 | MATPAVPVSAPPATPTPVPAAA | 216 | VRLHPVILASIVDSYERRNE |
| HUMAN | | PASVPAPTPAPAAAPVPAAAPA | | GAARVIGTLLGTVDKHSVEV |
| Eukaryotic | | SSSDPAAAAAATAAPGQTPASA | | TNCFSVPHNESEDEVAVDME |
| translation | | QAPAQTPAPALPGPALPGPFPG | | FAKNMYELHKKVSPNELILG |
| initiation | | GRVVRLHPVILASIVDSYERRN | | WYATGHDITEHSVLIHEYYS |
| factor 3 | | EGAARVIGTLLGTVDKHSVEVT | | REAPNPIHLTVDTSLQNGRM |
| subunit F | | NCFSVPHNESEDEVAVDMEFAK | | SIKAYVSTLMGVPGRTMGVM |
| | | NMYELHKKVSPNELILGWYATG | | FTPLTVKYAYYDTERIGVDL |
| | | HDITEHSVLIHEYYSREAPNPI | | IMKTCFSPNRVIGLSSDLQQ |
| | | HLTVDTSLQNGRMSIKAYVSTL | | VGGASARIQDALSTVLQYAE |
| | | MGVPGRTMGVMFTPLTVKYAYY | | DVLSGKVSADNTVGRFLMSL |
| | | DTERIGVDLIMKTCFSPNRVIG | | VNQVPKIVPDDFETMLNSNI |
| | | LSSDLQQVGGASARIQDALSTV | | NDLLMVTYLANLTQSQIALN |
| | | LQYAEDVLSGKVSADNTVGREL | | EKLVNL |
| | | MSLVNQVPKIVPDDFETMLNSN | | |
| | | INDLLMVTYLANLTQSQIALNE | | |
| | | KLVNL | | |
| PSMD7_HUMAN | 109 | MPELAVQKVVVHPLVLLSVVDH | 217 | VVVHPLVLLSVVDHENRIGK |
| M26S | | FNRIGKVGNQKRVVGVLLGSWQ | | VGNQKRVVGVLLGSWQKKVL |
| proteasome | | KKVLDVSNSFAVPFDEDDKDDS | | DVSNSFAVPFDEDDKDDSVW |
| non-ATPase | | VWFLDHDYLENMYGMFKKVNAR | | FLDHDYLENMYGMFKKVNAR |
| regulatory | | ERIVGWYHTGPKLHKNDIAINE | | ERIVGWYHTGPKLHKNDIAI |
| subunit 7 | | LMKRYCPNSVLVIIDVKPKDLG | | NELMKRYCPNSVLVIIDVKP |
| | | LPTEAYISVEEVHDDGTPTSKT | | KDLGLPTEAYISVEEVHDDG |
| | | FEHVTSEIGAEEAEEVGVEHLL | | TPTSKTFEHVTSEIGAEEAE |
| | | RDIKDTTVGTLSQRITNQVHGL | | EVGVEHLLRDIKDTTVGTLS |
| | | KGLNSKLLDIRSYLEKVATGKL | | QRITNQVHGLKGLNSKLLDI |
| | | PINHQIIYQLQDVENLLPDVSL | | RSYLEKVATGKLPINHQIIY |
| | | QEFVKAFYLKTNDQMVVVYLAS | | QLQDVFNLLPDVSLQEFVKA |
| | | LIRSVVALHNLINNKIANRDAE | | FYLKTNDQMVVVYLASLIRS |
| | | KKEGQEKEESKKDRKEDKEKDK | | VVALHNLINNKIANRDAEKK |
| | | DKEKSDVKKEEKKEKK | | EGQEKEESKKDRKEDKEKDK |
| | | | | DKEKSDVKKEEKKEKK |
| EIF3H_HUMAN | 110 | MASRKEGTGSTATSSSSTAGAA | 218 | VQIDGLVVLKIIKHYQEEGQ |
| AN | | GKGKGKGGSGDSAVKQVQIDGL | | GTEVVQGVLLGLVVEDRLEI |
| Eukaryotic | | VVLKIIKHYQEEGQGTEVVQGV | | TNCFPFPQHTEDDADEDEVQ |
| translation | | LLGLVVEDRLEITNCFPFPQHT | | YQMEMMRSLRHVNIDHLHVG |
| initiation | | EDDADFDEVQYQMEMMRSLRHV | | WYQSTYYGSFVTRALLDSQF |
| factor 3 | | NIDHLHVGWYQSTYYGSFVTRA | | SYQHAIEESVVLIYDPIKTA |
| subunit H | | LLDSQFSYQHAIEESVVLIYDP | | QGSLSLKAYRLTPKLMEVCK |
| | | IKTAQGSLSLKAYRLTPKLMEV | | EKDESPEALKKANITFEYME |
| | | CKEKDESPEALKKANITFEYME | | EEVPIVIKNSHLINVLMWEL |
| | | EEVPIVIKNSHLINVLMWELEK | | EKKSAVADKHELLSLASSNH |
| | | KSAVADKHELLSLASSNHLG | | LGKNLQLLMDRVDEMSQDIV |
| | | KNLQLLMDRVDEMSQDIVKYNT | | KYNTYMRNTSKQQQQKHQYQ |
| | | YMRNTSKQQQQKHQYQQRRQQE | | QRRQQENMQRQSRGEPPLPE |
| | | NMQRQSRGEPPLPEEDLSKLFK | | EDLSKLFKPPQPPARMDSLL |
| | | PPQPPARMDSLLIAGQINTYCQ | | IAGQINTYCQNIKEFTAQNL |
| | | NIKEFTAQNLGKLFMAQALQEY | | GKLEMAQALQEYNN |
| | | NN | | |
| CSN5_HUMAN | 111 | MAASGSGMAQKTWELANNMQEA | 219 | YCKISALALLKMVMHARSGG |
| COP9 | | QSIDEIYKYDKKQQQEILAAKP | | NLEVMGLMLGKVDGETMIIM |
| signalosome | | WTKDHHYFKYCKISALALLKMV | | DSFALPVEGTETRVNAQAAA |
| complex | | MHARSGGNLEVMGLMLGKVDGE | | YEYMAAYIENAKQVGRLENA |
| subunit 5 | | TMIIMDSFALPVEGTETRVNAQ | | IGWYHSHPGYGCWLSGIDVS |
| | | AAAYEYMAAYIENAKQVGRLEN | | TQMLNQQFQEPFVAVVIDPT |
| | | AIGWYHSHPGYGCWLSGIDVST | | RTISAGKVNLGAFRTYPKGY |
| | | QMLNQQFQEPFVAVVIDPTRTI | | KPPDEGPSEYQTIPLNKIED |
| | | SAGKVNLGAFRTYPKGYKPPDE | | FGVHCKQYYALEVSYFKSSL |
| | | GPSEYQTIPLNKIEDFGVHCKQ | | DRKLLELLWNKYWVNTLSSS |
| | | YYALEVSYFKSSLDRKLLELLW | | SLLTNADYTTGQVEDLSEKL |
| | | NKYWVNTLSSSSLLTNADYTTG | | EQSEAQLGRGSFMLGLETHD |
| | | QVFDLSEKLEQSEAQLGRGSFM | | RKSEDKLAKATRDSCKTTIE |
| | | LGLETHDRKSEDKLAKATRDSC | | AIHGLMSQVIKDKLENQINI |
| | | KTTIEAIHGLMSQVIKDKLENQ | | S |
| | | INIS | | |
| BRCC3_HUMAN | 112 | MAVQVVQAVQAVHLESDAFLVC | 220 | VHLESDAFLVCLNHALSTEK |
| MLys-63- | | LNHALSTEKEEVMGLCIGELND | | EEVMGLCIGELNDDTRSDSK |
| specific | | DTRSDSKFAYTGTEMRTVAEKV | | FAYTGTEMRTVAEKVDAVRI |
| deubiquitinase | | DAVRIVHIHSVIILRRSDKRKD | | VHIHSVIILRRSDKRKDRVE |
| BRCC36 | | RVEISPEQLSAASTEAERLAEL | | ISPEQLSAASTEAERLAELT |
| | | TGRPMRVVGWYHSHPHITVWPS | | GRPMRVVGWYHSHPHITVWP |
| | | HVDVRTQAMYQMMDQGFVGLIF | | SHVDVRTQAMYQMMDQGFVG |
| | | SCFIEDKNTKTGRVLYTCFQSI | | LIFSCFIEDKNTKTGRVLYT |
| | | QAQKSSESLHGPRDFWSSSQHI | | CFQSIQAQKSSESLHGPRDE |
| | | SIEGQKEEERYERIEIPIHIVP | | WSSSQHISIEGQKEEERYER |
| | | HVTIGKVCLESAVELPKILCQE | | IEIPIHIVPHVTIGKVCLES |
| | | EQDAYRRIHSLTHLDSVTKIHN | | AVELPKILCQEEQDAYRRIH |
| | | GSVFTKNLCSQMSAVSGPLLQW | | SLTHLDSVTKIHNGSVETKN |
| | | LEDRLEQNQQHLQELQQEKEEL | | LCSQMSAVSGPLLQWLEDRL |
| | | MQELSSLE | | EQNQQHLQELQQEKEELMQE |
| | | | | LSSLE |

### 5.3.2 Targeting Domain

[0214] In some embodiments, the targeting domain comprises a targeting moiety that specifically binds to a target membrane protein. In some embodiments, the targeting moiety comprises an antibody (or antigen binding fragment thereof). In some embodiments, the antibody is a full-length antibody, a single chain variable fragment (scFv), a (scFv)₂, a scFv-Fc, a Fab, a Fab′, a (Fab′)₂, a F(v), a single domain antibody, a single chain antibody, a VHH, or a (VHH)₂. In some embodiments the targeting moiety comprises a VHH. In some embodiments the targeting moiety comprises a (VHH)₂.

[0215] In some embodiments, the targeting moiety specifically binds to a wild type target membrane protein. In some embodiments, the targeting moiety specifically binds to a wild type target membrane protein, but does not specifically binds to a variant of the target membrane protein associated with a genetic disease. In some embodiments, the targeting moiety specifically binds to a naturally occurring variant of a target membrane protein. In some embodiments, the targeting moiety specifically binds to a naturally occurring variant of a target membrane protein that is associated with a genetic disease (e.g., a genetic disease described herein). In some embodiments, the targeting moiety specifically binds to a naturally occurring variant of a target membrane protein that is a cause of a genetic disease (e.g., a genetic disease described herein). In some embodiments, the targeting moiety specifically binds a naturally occurring variant of a target membrane protein that is a loss of a function variant. In some embodiments, the targeting moiety specifically binds a naturally occurring variant of a target membrane protein that is a loss of a function variant associated with a genetic disease (e.g., a genetic disease described herein). In some embodiments, the targeting moiety specifically binds a naturally occurring variant of a target membrane protein that is a loss of a function variant that causes a genetic disease (e.g., a genetic disease described herein).

### 5.3.2.1 Exemplary Target Membrane Proteins

[0216] In some embodiments, targeting moiety specifically binds a target membrane protein (e.g., a membrane protein described herein). Exemplary target membrane proteins include, but are not limited to, glutamate receptor ionotropic NMDA 2B (GRIN2B), cystic fibrosis transmembrane conductance regulator (CFTR), sodium channel protein type 1 subunit alpha (SCN1A), copper-transporting ATPase 2 (ATP7B), potassium voltage-gated channel subfamily KQT member 2 (KCNQ2), sodium channel protein type 2 subunit alpha (SCN2A), voltage-dependent P/Q-type calcium channel subunit alpha-1A (CACNA1A), solute carrier family 2, facilitated glucose transporter member 1 (SLC2A1), sodium channel protein type 8 subunit alpha (SCN8A), proline-rich transmembrane protein 2 (PRRT2), glutamate receptor ionotropic, NMDA 2A (GRIN2A), sodium- and chloride-dependent GABA transporter 1 (SLC6A1), usherin (USH2A), sodium/potassium-transporting ATPase subunit alpha-2 (ATP1A2), sodium/potassium-transporting ATPase subunit alpha-3 (ATP1A3), sodium channel protein type 9 subunit alpha (SCN9A), protocadherin-19 (PCDH19), gamma-aminobutyric acid receptor subunit beta-3 (GABRB3), tuberin (TSC2), hamartin (TSC1), potassium voltage-gated channel subfamily KQT member 3 (KCNQ3), dystrophin (DMD), rhodopsin (RHO), protein jagged-1 (JAG1), inositol 1,4,5-trisphosphate receptor type 1 (ITPR1), sugar transporter SWEET1 (SLC50A1), transmembrane protein 258 (TMEM258), and follicle-stimulating hormone receptor (FSHR).

[0217] In some embodiments, the target membrane protein is GRIN2B. In some embodiments, the target membrane protein is CFTR. In some embodiments, the target membrane protein is SCN1A. In some embodiments, the target membrane protein is ATP7B. In some embodiments, the target membrane protein is KCNQ2. In some embodiments, the target membrane protein is SCN2A. In some embodiments, the target membrane protein is CACNA1A. In some embodiments, the target membrane protein is SLC2A1. In some embodiments, the target membrane protein is SCN8A. In some embodiments, the target membrane protein is PRRT2. In some embodiments, the target membrane protein is GRIN2A. In some embodiments, the target membrane protein is SLC6A1. In some embodiments, the target membrane protein is USH2A. In some embodiments, the target membrane protein is ATP1A2. In some embodiments, the target membrane protein is ATP1A3. In some embodiments, the target membrane protein is SCN9A. In some embodiments, the target membrane protein is PCDH19. In some embodiments, the target membrane protein is GABRB3. In some embodiments, the target membrane protein is TSC2. In some embodiments, the target membrane protein is TSC1. In some embodiments, the target membrane protein is KCNQ3. In some embodiments, the target membrane protein is DMD. In some embodiments, the target membrane protein is RHO. In some embodiments, the target membrane protein is JAG1. In some embodiments, the target membrane protein is ITPR1. In some embodiments, the target membrane protein is sugar transporter SWEET1 (SLC50A1). In some embodiments, the target membrane protein is transmembrane protein 258 (TMEM258). In some embodiments, the target membrane protein is follicle-stimulating hormone receptor (FSHR).

[0218] In some embodiments, the target membrane protein comprises an amino acid sequence at least 90%, 91%, 92%, 93%, 94%, 95%, 96%, 97%, 98%, 99%, or 100% identical to the amino acid sequence of any one of SEQ ID NOS: 221-245. In some embodiments, the target membrane protein comprises an amino acid sequence at least 90%, 91%, 92%, 93%, 94%, 95%, 96%, 97%, 98%, 99%, or 100% identical to the amino acid sequence of SEQ ID NO: 221. In some embodiments, the target membrane protein comprises an amino acid sequence at least 90%, 91%, 92%, 93%, 94%, 95%, 96%, 97%, 98%, 99%, or 100% identical to the amino acid sequence of SEQ ID NO: 222. In some embodiments, the target membrane protein comprises an amino acid sequence at least 90%, 91%, 92%, 93%, 94%, 95%, 96%, 97%, 98%, 99%, or 100% identical to the amino acid sequence of SEQ ID NO: 223. In some embodiments, the target membrane protein comprises an amino acid sequence at least 90%, 91%, 92%, 93%, 94%, 95%, 96%, 97%, 98%, 99%, or 100% identical to the amino acid sequence of SEQ ID NO: 224. In some embodiments, the target membrane protein comprises an amino acid sequence at least 90%, 91%, 92%, 93%, 94%, 95%, 96%, 97%, 98%, 99%, or 100% identical to the amino acid sequence of SEQ ID NO: 225. In some embodiments, the target membrane protein comprises an amino acid sequence at least 90%, 91%, 92%, 93%, 94%, 95%, 96%, 97%, 98%, 99%, or 100% identical to the amino acid sequence of SEQ ID NO: 226. In some embodiments, the target membrane protein comprises an amino acid sequence at least 90%, 91%, 92%, 93%, 94%, 95%, 96%, 97%, 98%, 99%, or 100% identical to the amino acid sequence of SEQ ID NO: 227. In some embodiments, the target membrane protein comprises an amino acid sequence at least 90%, 91%, 92%, 93%, 94%, 95%, 96%, 97%, 98%, 99%, or 100% identical to the amino acid sequence of SEQ ID NO: 228. In some embodiments, the target membrane protein comprises an amino acid sequence at least 90%, 91%, 92%, 93%, 94%, 95%, 96%, 97%, 98%, 99%, or 100% identical to the amino acid sequence of SEQ ID NO: 229. In some embodiments, the target membrane protein comprises an amino acid sequence at least 90%, 91%, 92%, 93%, 94%, 95%, 96%, 97%, 98%, 99%, or 100% identical to the amino acid sequence of SEQ ID NO: 230. In some embodiments, the target membrane protein comprises an amino acid sequence at least 90%, 91%, 92%, 93%, 94%, 95%, 96%, 97%, 98%, 99%, or 100% identical to the amino acid sequence of SEQ ID NO: 240. In some embodiments, the target membrane protein comprises an amino acid sequence at least 90%, 91%, 92%, 93%, 94%, 95%, 96%, 97%, 98%, 99%, or 100% identical to the amino acid sequence of SEQ ID NO: 241. In some embodiments, the target membrane protein comprises an amino acid sequence at least 90%, 91%, 92%, 93%, 94%, 95%, 96%, 97%, 98%, 99%, or 100% identical to the amino acid sequence of SEQ ID NO: 242. In some embodiments, the target membrane protein comprises an amino acid sequence at least 90%, 91%, 92%, 93%, 94%, 95%, 96%, 97%, 98%, 99%, or 100% identical to the amino acid sequence of SEQ ID NO: 243. In some embodiments, the target membrane protein comprises an amino acid sequence at least 90%, 91%, 92%, 93%, 94%, 95%, 96%, 97%, 98%, 99%, or 100% identical to the amino acid sequence of SEQ ID NO: 244. In some embodiments, the target membrane protein comprises an amino acid sequence at least 90%, 91%, 92%, 93%, 94%, 95%, 96%, 97%, 98%, 99%, or 100% identical to the amino acid sequence of SEQ ID NO: 245. In some embodiments, the target membrane protein comprises an amino acid sequence at least 90%, 91%, 92%, 93%, 94%, 95%, 96%, 97%, 98%, 99%, or 100% identical to the amino acid sequence of SEQ ID NO: 294. In some embodiments, the target membrane protein comprises an amino acid sequence at least 90%, 91%, 92%, 93%, 94%, 95%, 96%, 97%, 98%, 99%, or 100% identical to the amino acid sequence of SEQ ID NO: 295. In some embodiments, the target membrane protein comprises an amino acid sequence at least 90%, 91%, 92%, 93%, 94%, 95%, 96%, 97%, 98%, 99%, or 100% identical to the amino acid sequence of SEQ ID NO: 296.

[0219] Table 2 below, provides the wild type amino acid sequence of exemplary proteins to target for deubiquitination utilizing the fusion proteins described herein.

TABLE 2
The amino acid sequence of exemplary membrane proteins to
target for deubiquitination utilizing the fusion proteins
described herein and exemplary disease associations

| | Disease | SEQ ID | |
|---|---|---|---|
| Description | Associations | NO | WT Amino Acid Sequence |
| Solute carrier | GLUT1 | 221 | MEPSSKKLTGRLMLAVGGAVLGSLQFGYNTGVINA |
| family 2, | Deficiency | | PQKVIEEFYNQTWVHRYGESILPTTLTTLWSLSVA |
| facilitated | Syndrome | | IFSVGGMIGSFSVGLFVNRFGRRNSMLMMNLLAFV |
| glucose | | | SAVLMGFSKLGKSFEMLILGRFIIGVYCGLTTGFV |
| transporter | | | PMYVGEVSPTALRGALGTLHQLGIVVGILIAQVEG |
| member 1 | | | LDSIMGNKDLWPLLLSIIFIPALLQCIVLPFCPES |
| (SLC2A1) | | | PRFLLINRNEENRAKSVLKKLRGTADVTHDLQEMK |
| | | | EESRQMMREKKVTILELFRSPAYRQPILIAVVLQL |
| | | | SQQLSGINAVFYYSTSIFEKAGVQQPVYATIGSGI |
| | | | VNTAFTVVSLFVVERAGRRTLHLIGLAGMAGCAIL |
| | | | MTIALALLEQLPWMSYLSIVAIFGFVAFFEVGPGP |
| | | | IPWFIVAELFSQGPRPAAIAVAGESNWTSNFIVGM |
| | | | CFQYVEQLCGPYVFIIFTVLLVLFFIFTYFKVPET |
| | | | KGRTFDEIASGFRQGGASQSDKTPEELFHPLGADS |
| | | | QV |
| Proline-rich | PRRT2 | 222 | MAASSSEISEMKGVEESPKVPGEGPGHSEAETGPP |
| transmembrane | Dyskinesia & | | QVLAGVPDQPEAPQPGPNTTAAPVDSGPKAGLAPE |
| protein 2 | Epilepsy; | | TTETPAGASETAQATDLSLSPGGESKANCSPEDPC |
| (PRRT2) | Episodic | | QETVSKPEVSKEATADQGSRLESAAPPEPAPEPAP |
| | kinesigenic | | QPDPRPDSQPTPKPALQPELPTQEDPTPEILSESV |
| | dyskinesia 1 | | GEKQENGAVVPLQAGDGEEGPAPEPHSPPSKKSPP |
| | | | ANGAPPRVLQQLVEEDRMRRAHSGHPGSPRGSLSR |
| | | | HPSSQLAGPGVEGGEGTQKPRDYIILAILSCFCPM |
| | | | WPVNIVAFAYAVMSRNSLQQGDVDGAQRLGRVAKL |
| | | | LSIVALVGGVLIIIASCVINLGVYK |
| Usherin | Usher | 223 | MNCPVLSLGSGFLFQVIEMLIFAYFASISLTESRG |
| (USH2A) | syndrome, type | | LFPRLENVGAFKKVSIVPTQAVCGLPDRSTFCHSS |
| Signal | 2A | | AAAESIQFCTQRFCIQDCPYRSSHPTYTALESAGL |
| Sequence | | | SSCITPDKNDLHPNAHSNSASFIFGNHKSCFSSPP |
| Underlined | | | SPKLMASFTLAVWLKPEQQGVMCVIEKTVDGQIVE |
| | | | KLTISEKETMFYYRTVNGLQPPIKVMTLGRILVKK |
| | | | WIHLSVQVHQTKISFFINGVEKDHTPENARTLSGS |
| | | | ITDFASGTVQIGQSLNGLEQFVGRMQDERLYQVAL |
| | | | TNREILEVESGDLLRLHAQSHCRCPGSHPRVHPLA |
| | | | QRYCIPNDAGDTADNRVSRLNPEAHPLSFVNDNDV |
| | | | GTSWVSNVFTNITQLNQGVTISVDLENGQYQVFYI |
| | | | IIQFFSPQPTEIRIQRKKENSLDWEDWQYFARNCG |
| | | | AFGMKNNGDLEKPDSVNCLQLSNFTPYSRGNVTFS |
| | | | ILTPGPNYRPGYNNFYNTPSLQEFVKATQIRFHFH |
| | | | GQYYTTETAVNLRHRYYAVDEITISGRCOCHGHAD |
| | | | NCDTTSQPYRCLCSQESFTEGLHCDRCLPLYNDKP |
| | | | FRQGDQVYAFNCKPCQCNSHSKSCHYNISVDPFPF |
| | | | EHFRGGGGVCDDCEHNTTGRNCELCKDYFFRQVGA |
| | | | DPSAIDVCKPCDCDTVGTRNGSILCDQIGGQCNCK |
| | | | RHVSGRQCNQCQNGFYNLQELDPDGCSPCNCNTSG |
| | | | TVDGDITCHQNSGQCKCKANVIGLRCDHCNFGEKF |
| | | | LRSFNDVGCEPCQCNLHGSVNKFCNPHSGQCECKK |
| | | | EAKGLQCDTCRENFYGLDVTNCKACDCDTAGSLPG |
| | | | TVCNAKTGQCICKPNVEGRQCNKCLEGNFYLRQNN |
| | | | SFLCLPCNCDKTGTINGSLLCNKSTGQCPCKLGVT |
| | | | GLRCNQCEPHRYNLTIDNFQHCQMCECDSLGTLPG |
| | | | TICDPISGQCLCVPNRQGRRCNQCQPGFYISPGNA |
| | | | TGCLPCSCHTTGAVNHICNSLTGQCVCQDASIAGO |
| | | | RCDQCKDHYFGFDPQTGRCQPCNCHLSGALNETCH |
| | | | LVTGQCFCKQFVTGSKCDACVPSASHLDVNNLLGC |
| | | | SKTPFQQPPPRGQVQSSSAINLSWSPPDSPNAHWL |
| | | | TYSLLRDGFEIYTTEDQYPYSIQYFLDTDLLPYTK |
| | | | YSYYIETTNVHGSTRSVAVTYKTKPGVPEGNLTLS |
| | | | YIIPIGSDSVTLTWTTLSNQSGPIEKYILSCAPLA |
| | | | GGQPCVSYEGHETSATIWNLVPFAKYDESVQACTS |
| | | | GGCLHSLPITVITAQAPPQRLSPPKMQKISSTELH |
| | | | VEWSPPAELNGIIIRYELYMRRLRSTKETTSEESR |
| | | | VFQSSGWLSPHSFVESANENALKPPQTMTTITGLE |
| | | | PYTKYEFRVLAVNMAGSVSSAWVSERTGESAPVEM |
| | | | IPPSVEPLSSYSLNISWEKPADNVTRGKVVGYDIN |
| | | | MLSEQSPQQSIPMAFSQLLHTAKSQELSYTVEGLK |
| | | | PYRIYEFTITLCNSVGCVTSASGAGQTLAAAPAQL |
| | | | RPPLVKGINSTTIHLRWFPPEELNGPSPIYQLERR |
| | | | ESSLPALMTTMMKGIRFIGNGYCKFPSSTHPVNTD |
| | | | FTGIKASFRTKVPEGLIVFAASPGNQEEYFALQLK |
| | | | KGRLYFLFDPQGSPVEVTTTNDHGKQYSDGKWHEI |
| | | | IAIRHQAFGQITLDGIYTGSSAILNGSTVIGDNTG |
| | | | VELGGLPRSYTILRKDPEIIQKGFVGCLKDVHEMK |
| | | | NYNPSAIWEPLDWQSSEEQINVYNSWEGCPASLNE |
| | | | GAQFLGAGFLELHPYMFHGGMNFEISEKFRTDQLN |
| | | | GLLLFVYNKDGPDFLAMELKSGILTFRLNTSLAFT |
| | | | QVDLLLGLSYCNGKWNKVIIKKEGSFISASVNGLM |
| | | | KHASESGDQPLVVNSPVYVGGIPQELLNSYQHLCL |
| | | | EQGFGGCMKDVKFTRGAVVNLASVSSGAVRVNLDG |
| | | | CLSTDSAVNCRGNDSILVYQGKEQSVYEGGLQPFT |
| | | | EYLYRVIASHEGGSVYSDWSRGRTTGAAPQSVPTP |
| | | | SRVRSLNGYSIEVTWDEPVVRGVIEKYILKAYSED |
| | | | STRPPRMPSASAEFVNTSNLTGILTGLLPFKNYAV |
| | | | TLTACTLAGCTESSHALNISTPQEAPQEVOPPVAK |
| | | | SLPSSLLLSWNPPKKANGIITQYCLYMDGRLIYSG |
| | | | SEENYIVTDLAVFTPHQFLLSACTHVGCTNSSWVL |
| | | | LYTAQLPPEHVDSPVLTVLDSRTIHIQWKQPRKIS |
| | | | GILERYVLYMSNHTHDFTIWSVIYNSTELFQDHML |
| | | | QYVLPGNKYLIKLGACTGGGCTVSEASEALTDEDI |
| | | | PEGVPAPKAHSYSPDSFNVSWTEPEYPNGVITSYG |
| | | | LYLDGILIHNSSELSYRAYGFAPWSLHSFRVQACT |
| | | | AKGCALGPLVENRTLEAPPEGTVNVFVKTQGSRKA |
| | | | HVRWEAPFRPNGLLTHSVLFTGIFYVDPVGNNYTL |
| | | | LNVTKVMYSGEETNLWVLIDGLVPFTNYTVQVNIS |
| | | | NSQGSLITDPITIAMPPGAPDGVLPPRLSSATPTS |
| | | | LQVVWSTPARNNAPGSPRYQLQMRSGDSTHGELEL |
| | | | FSNPSASLSYEVSDLQPYTEYMERLVASNGFGSAH |
| | | | SSWIPEMTAEDKPGPVVPPILLDVKSRMMLVTWQH |
| | | | PRKSNGVITHYNIYLHGRLYLRTPGNVTNCTVMHL |
| | | | HPYTAYKFQVEACTSKGCSLSPESQTVWTLPGAPE |
| | | | GIPSPELFSDTPTSVIISWQPPTHPNGLVENETIE |
| | | | RRVKGKEEVTTLVTLPRSHSMRFIDKTSALSPWTK |
| | | | YEYRVLMSTLHGGTNSSAWVEVTTRPSRPAGVQPP |
| | | | VVTVLEPDAVQVTWKPPLIQNGDILSYEIHMPDPH |
| | | | ITLTNVTSAVLSQKVTHLIPFTNYSVTIVACSGGN |
| | | | GYLGGCTESLPTYVTTHPTVPQNVGPLSVIPLSES |
| | | | YVVISWOPPSKPNGPNLRYELLRRKIQQPLASNPP |
| | | | EDLNRWHNIYSGTQWLYEDKGLSRFTTYEYMLFVH |
| | | | NSVGFTPSREVTVTTLAGLPERGANLTASVLNHTA |
| | | | IDVRWAKPTVQDLQGEVEYYTLFWSSATSNDSLKI |
| | | | LPDVNSHVIGHLKPNTEYWIFISVENGVHSINSAG |
| | | | LHATTCDGEPQGMLPPEVVIINSTAVRVIWTSPSN |
| | | | PNGVVTEYSIYVNNKLYKTGMNVPGSFILRDLSPF |
| | | | TIYDIQVEVCTIYACVKSNGTQITTVEDTPSDIPT |
| | | | PTIRGITSRSLQIDWVSPRKPNGIILGYDLLWKTW |
| | | | YPCAKTQKLVQDQSDELCKAVRCQKPESICGHICY |
| | | | SSEAKVCCNGVLYNPKPGHRCCEEKYIPFVLNSTG |
| | | | VCCGGRIQEAQPNHQCCSGYYARILPGEVCCPDEQ |
| | | | HNRVSVGIGDSCCGRMPYSTSGNQICCAGRLHDGH |
| | | | GQKCCGRQIVSNDLECCGGEEGVVYNRLPGMFCCG |
| | | | QDYVNMSDTICCSASSGESKAHIKKNDPVPVKCCE |
| | | | TELIPKSQKCCNGVGYNPLKYVCSDKISTGMMMKE |
| | | | TKECRILCPASMEATEHCGRCDENFTSHICTVIRG |
| | | | SHNSTGKASIEEMCSSAEETIHTGSVNTYSYTDVN |
| | | | LKPYMTYEYRISAWNSYGRGLSKAVRARTKEDVPQ |
| | | | GVSPPTWTKIDNLEDTIVLNWRKPIQSNGPIIYYI |
| | | | LLRNGIERFRGTSLSFSDKEGIQPFQEYSYQLKAC |
| | | | TVAGCATSSKVVAATTQGVPESILPPSITALSAVA |
| | | | LHLSWSVPEKSNGVIKEYQIRQVGKGLIHTDTTDR |
| | | | RQHTVTGLQPYTNYSFTLTACTSAGCTSSEPFLGQ |
| | | | TLQAAPEGVWVTPRHIIINSTTVELYWSLPEKPNG |
| | | | LVSQYQLSRNGNLLFLGGSEEQNFTDKNLEPNSRY |
| | | | TYKLEVKTGGGSSASDDYIVQTPMSTPEEIYPPYN |
| | | | ITVIGPYSIFVAWIPPGILIPEIPVEYNVLLNDGS |
| | | | VTPLAFSVGHHQSTLLENLTPFTQYEIRIQACONG |
| | | | SCGVSSRMFVKTPEAAPMDLNSPVLKALGSACIEI |
| | | | KWMPPEKPNGIIINYFIYRRPAGIEEESVLFVWSE |
| | | | GALEFMDEGDTLRPFTLYEYRVRACNSKGSVESLW |
| | | | SLTQTLEAPPQDEPAPWAQATSAHSVLLNWTKPES |
| | | | PNGIISHYRVVYQERPDDPTFNSPTVHAFTVKGTS |
| | | | HQAHLYGLEPFTTYRIGVVAANHAGEILSPWTLIQ |
| | | | TLESSPSGLRNFIVEQKENGRALLLQWSEPMRING |
| | | | VIKTYNIFSDGFLEYSGLNRQFLFRRLDPFTLYTL |
| | | | TLEACTRAGCAHSAPQPLWTDEAPPDSQLAPTVHS |
| | | | VKSTSVELSWSEPVNPNGKIIRYEVIRRCFEGKAW |
| | | | GNQTIQADEKIVFTEYNTERNTEMYNDTGLQPWTQ |
| | | | CEYKIYTWNSAGHTCSSWNVVRTLQAPPEGLSPPV |
| | | | ISYVSMNPQKLLISWIPPEQSNGIIQSYRLORNEM |
| | | | LYPFSFDPVTFNYTDEELLPFSTYSYALQACTSGG |
| | | | CSTSKPTSITTLEAAPSEVSPPDLWAVSATQMNVC |
| | | | WSPPTVQNGKITKYLVRYDNKESLAGQGLCLLVSH |
| | | | LQPYSQYNFSLVACTNGGCTASVSKSAWTMEALPE |
| | | | NMDSPTLQVTGSESIEITWKPPRNPNGQIRSYELR |
| | | | RDGTIVYTGLETRYRDFTLTPGVEYSYTVTASNSQ |
| | | | GGILSPLVKDRTSPSAPSGMEPPKLQARGPQEILV |
| | | | NWDPPVRTNGDIINYTLFIRELFERETKIIHINTT |
| | | | HNSFGMQSYIVNQLKPFHRYEIRIQACTTLGCASS |
| | | | DWTFIQTPEIAPLMQPPPHLEVQMAPGGFQPTVSL |
| | | | LWTGPLQPNGKVLYYELYRRQIATQPRKSNPVLIY |
| | | | NGSSTSFIDSELLPFTEYEYQVWAVNSAGKAPSSW |
| | | | TWCRTGPAPPEGLRAPTFHVISSTQAVVNISAPGK |
| | | | PNGIVSLYRLESSSAHGAETVLSEGMATQQTLHGL |
| | | | QAFTNYSIGVEACTCFNCCSKGPTAELRTHPAPPS |
| | | | GLSSPQIGTLASRTASFRWSPPMFPNGVIHSYELQ |
| | | | FHVACPPDSALPCTPSQIETKYTGLGQKASLGGLQ |
| | | | PYTTYKLRVVAHNEVGSTASEWISFTTQKELPQYR |
| | | | APFSVDSNLSVVCVNWSDTFLLNGQLKEYVLTDGG |
| | | | RRVYSGLDTTLYIPRTADKTFFFQVICTTDEGSVK |
| | | | TPLIQYDTSTGLGLVLTTPGKKKGSRSKSTEFYSE |
| | | | LWFIVLMAMLGLILLAIFLSLILQRKIHKEPYIRE |
| | | | RPPLVPLQKRMSPLNVYPPGENHMGLADTKIPRSG |
| | | | TPVSIRSNRSACVLRIPSQNQTSLTYSQGSLHRSV |
| | | | SQLMDIQDKKVLMDNSLWEAIMGHNSGLYVDEEDL |
| | | | MNAIKDESSVTKERTTFTDTHL |
| Protocadherin- | PCDH19 | 224 | MESLLLPVLLLLAILWTQAAALINLKYSVEEEQRA |
| 19 | Encephalopathy; | | GTVIANVAKDAREAGFALDPRQASAFRVVSNSAPH |
| (PCDH19) | Early Infantile | | LVDINPSSGLLVTKQKIDRDLLCRQSPKCIISLEV |
| Signal | Epileptic | | MSSSMEICVIKVEIKDLNDNAPSFPAAQIELEISE |
| Sequence | Encephalopathy | | AASPGTRIPLDSAYDPDSGSFGVQTYELTPNELFG |
| Underlined | 9 | | LEIKTRGDGSRFAELVVEKSLDRETQSHYSFRITA |
| | | | LDGGDPPRLGTVGLSIKVTDSNDNNPVFSESTYAV |
| | | | SVPENSPPNTPVIRLNASDPDEGINGQVVYSFYGY |
| | | | VNDRTRELFQIDPHSGLVTVTGALDYEEGHVYELD |
| | | | VQAKDLGPNSIPAHCKVTVSVLDTNDNPPVINLLS |
| | | | VNSELVEVSESAPPGYVIALVRVSDRDSGLNGRVQ |
| | | | CRLLGNVPFRLQEYESFSTILVDGRLDREQHDQYN |
| | | | LTIQARDGGVPMLQSAKSFTVLITDENDNHPHESK |
| | | | PYYQVIVOENNTPGAYLLSVSARDPDLGLNGSVSY |
| | | | QIVPSQVRDMPVFTYVSINPNSGDIYALRSENHEQ |
| | | | TKAFEFKVLAKDGGLPSLQSNATVRVIILDVNDNT |
| | | | PVITAPPLINGTAEVYIPRNSGIGYLVTVVKAEDY |
| | | | DEGENGRVTYDMTEGDRGFFEIDQVNGEVRTTRTF |
| | | | GESSKSSYELIVVAHDHGKTSLSASALVLIYLSPA |
| | | | LDAQESMGSVNLSLIFIIALGSIAGILFVTMIFVA |
| | | | IKCKRDNKEIRTYNCSNCLTITCLLGCFIKGQNSK |
| | | | CLHCISVSPISEEQDKKTEEKVSLRGKRIAEYSYG |
| | | | HQKKSSKKKKISKNDIRLVPRDVEETDKMNVVSCS |
| | | | SLTSSLNYFDYHQQTLPLGCRRSESTELNVENQNT |
| | | | RNTSANHIYHHSFNSQGPQQPDLIINGVPLPETEN |
| | | | YSFDSNYVNSRAHLIKSSSTFKDLEGNSLKDSGHE |
| | | | ESDQTDSEHDVQRSLYCDTAVNDVLNTSVTSMGSQ |
| | | | MPDHDQNEGFHCREECRILGHSDRCWMPRNPMPIR |
| | | | SKSPEHVRNIIALSIEATAADVEAYDDCGPTKRTF |
| | | | ATFGKDVSDHPAEERPTLKGKRTVDVTICSPKVNS |
| | | | VIREAGNGCEAISPVTSPLHLKSSLPTKPSVSYTI |
| | | | ALAPPARDLEQYVNNVNNGPTRPSEAEPRGADSEK |
| | | | VMHEVSPILKEGRNKESPGVKRLKDIVL |
| Tuberin | Tuberous | 225 | MAKPTSKDSGLKEKFKILLGLGTPRPNPRSAEGKQ |
| (TSC2) | sclerosis-2 | | TEFIITAEILRELSMECGLNNRIRMIGQICEVAKT |
| | | | KKFEEHAVEALWKAVADLLQPERPLEARHAVLALL |
| | | | KAIVQGQGERLGVLRALFFKVIKDYPSNEDLHERL |
| | | | EVFKALTDNGRHITYLEEELADFVLQWMDVGLSSE |
| | | | FLLVLVNLVKENSCYLDEYIARMVQMICLLCVRTA |
| | | | SSVDIEVSLQVLDAVVCYNCLPAESLPLFIVTLCR |
| | | | TINVKELCEPCWKLMRNLLGTHLGHSAIYNMCHLM |
| | | | EDRAYMEDAPLLRGAVFFVGMALWGAHRLYSLRNS |
| | | | PTSVLPSFYQAMACPNEVVSYEIVLSITRLIKKYR |
| | | | KELQVVAWDILLNIIERLLQQLQTLDSPELRTIVH |
| | | | DLLTTVEELCDQNEFHGSQERYFELVERCADQRPE |
| | | | SSLLNLISYRAQSIHPAKDGWIQNLQALMERFERS |
| | | | ESRGAVRIKVLDVLSFVLLINRQFYEEELINSVVI |
| | | | SQLSHIPEDKDHQVRKLATQLLVDLAEGCHTHHEN |
| | | | SLLDIIEKVMARSLSPPPELEERDVAAYSASLEDV |
| | | | KTAVLGLLVILQTKLYTLPASHATRVYEMLVSHIQ |
| | | | LHYKHSYTLPIASSIRLQAFDELLLLRADSLHRLG |
| | | | LPNKDGVVRFSPYCVCDYMEPERGSEKKTSGPLSP |
| | | | PTGPPGPAPAGPAVRLGSVPYSLLERVLLQCLKQE |
| | | | SDWKVLKLVLGRLPESLRYKVLIFTSPCSVDQLCS |
| | | | ALCSMLSGPKTLERLRGAPEGESRTDLHLAVVPVL |
| | | | TALISYHNYLDKTKQREMVYCLEQGLIHRCASQCV |
| | | | VALSICSVEMPDIIIKALPVLVVKLTHISATASMA |
| | | | VPLLEFLSTLARLPHLYRNFAAEQYASVFAISLPY |
| | | | TNPSKENQYIVCLAHHVIAMWFIRCRLPERKDEVP |
| | | | FITKGLRSNVLLSFDDTPEKDSFRARSTSLNERPK |
| | | | SLRIARPPKQGLNNSPPVKEFKESSAAEAFRCRSI |
| | | | SVSEHVVRSRIQTSLTSASLGSADENSVAQADDSL |
| | | | KNLHLELTETCLDMMARYVESNFTAVPKRSPVGEF |
| | | | LLAGGRTKTWLVGNKLVTVTTSVGTGTRSLLGLDS |
| | | | GELQSGPESSSSPGVHVRQTKEAPAKLESQAGQQV |
| | | | SRGARDRVRSMSGGHGLRVGALDVPASQFLGSATS |
| | | | PGPRTAPAAKPEKASAGTRVPVQEKTNLAAYVPLL |
| | | | TQGWAEILVRRPTGNTSWLMSLENPLSPFSSDINN |
| | | | MPLQELSNALMAAERFKEHRDTALYKSLSVPAAST |
| | | | AKPPPLPRSNTVASFSSLYQSSCQGQLHRSVSWAD |
| | | | SAVVMEEGSPGEVPVLVEPPGLEDVEAALGMDRRT |
| | | | DAYSRSSSVSSQEEKSLHAEELVGRGIPIERVVSS |
| | | | EGGRPSVDLSFQPSQPLSKSSSSPELQTLQDILGD |
| | | | PGDKADVGRLSPEVKARSQSGTLDGESAAWSASGE |
| | | | DSRGQPEGPLPSSSPRSPSGLRPRGYTISDSAPSR |
| | | | RGKRVERDALKSRATASNAEKVPGINPSFVFLQLY |
| | | | HSPFFGDESNKPILLPNESQSFERSVOLLDQIPSY |
| | | | DTHKIAVLYVGEGQSNSELAILSNEHGSYRYTEFL |
| | | | TGLGRLIELKDCQPDKVYLGGLDVCGEDGQFTYCW |
| | | | HDDIMQAVFHIATLMPTKDVDKHRCDKKRHLGNDE |
| | | | VSIVYNDSGEDFKLGTIKGQFNFVHVIVTPLDYEC |
| | | | NLVSLQCRKDMEGLVDTSVAKIVSDRNLPFVARQM |
| | | | ALHANMASQVHHSRSNPTDIYPSKWIARLRHIKRL |
| | | | RQRICEEAAYSNPSLPLVHPPSHSKAPAQTPAEPT |
| | | | PGYEVGQRKRLISSVEDFTEFV |
| Hamartin | Tuberous | 226 | MAQQANVGELLAMLDSPMLGVRDDVTAVEKENLNS |
| (TSC1) | sclerosis-1 | | DRGPMLVNTLVDYYLETSSQPALHILTTLQEPHDK |
| | | | HLLDRINEYVGKAATRLSILSLLGHVIRLQPSWKH |
| | | | KLSQAPLLPSLLKCLKMDTDVVVLTTGVLVLITML |
| | | | PMIPQSGKQHLLDFFDIFGRLSSWCLKKPGHVAEV |
| | | | YLVHLHASVYALFHRLYGMYPCNFVSFLRSHYSMK |
| | | | ENLETFEEVVKPMMEHVRIHPELVTGSKDHELDPR |
| | | | RWKRLETHDVVIECAKISLDPTEASYEDGYSVSHQ |
| | | | ISARFPHRSADVTTSPYADTQNSYGCATSTPYSTS |
| | | | RLMLLNMPGQLPQTLSSPSTRLITEPPQATLWSPS |
| | | | MVCGMTTPPTSPGNVPPDLSHPYSKVEGTTAGGKG |
| | | | TPLGTPATSPPPAPLCHSDDYVHISLPQATVTPPR |
| | | | KEERMDSARPCLHRQHHLLNDRGSEEPPGSKGSVT |
| | | | LSDLPGELGDLASEEDSIEKDKEEAAISRELSEIT |
| | | | TAEAEPVVPRGGFDSPFYRDSLPGSQRKTHSAASS |
| | | | SQGASVNPEPLHSSLDKLGPDTPKQAFTPIDLPCG |
| | | | SADESPAGDRECQTSLETSIFTPSPCKIPPPTRVG |
| | | | FGSGQPPPYDHLFEVALPKTAHHFVIRKTEELLKK |
| | | | AKGNTEEDGVPSTSPMEVLDRLIQQGADAHSKELN |
| | | | KLPLPSKSVDWTHEGGSPPSDEIRTLRDQLLLLHN |
| | | | QLLYERFKRQQHALRNRRLLRKVIKAAALEEHNAA |
| | | | MKDQLKLQEKDIQMWKVSLQKEQARYNQLQEQRDT |
| | | | MVTKLHSQIRQLQHDREEFYNQSQELQTKLEDCRN |
| | | | MIAELRIELKKANNKVCHTELLLSQVSQKLSNSES |
| | | | VQQQMEFLNROLLVLGEVNELYLEQLQNKHSDTTK |
| | | | EVEMMKAAYRKELEKNRSHVLQQTORLDTSQKRIL |
| | | | ELESHLAKKDHLLLEQKKYLEDVKLQARGQLQAAE |
| | | | SRYEAQKRITQVFELEILDLYGRLEKDGLLKKLEE |
| | | | EKAEAAEAAEERLDCCNDGCSDSMVGHNEEASGHN |
| | | | GETKTPRPSSARGSSGSRGGGGSSSSSSELSTPEK |
| | | | PPHQRAGPFSSRWETTMGEASASIPTTVGSLPSSK |
| | | | SFLGMKARELFRNKSESQCDEDGMTSSLSESLKTE |
| | | | LGKDLGVEAKIPLNLDGPHPSPPTPDSVGQLHIMD |
| | | | YNETHHEHS |
| Dystrophin | Becker | 227 | MLWWEEVEDCYEREDVQKKTFTKWVNAQFSKFGKQ |
| (DMD) | Muscular | | HIENLFSDLQDGRRLLDLLEGLTGQKLPKEKGSTR |
| | Dystrophy | | VHALNNVNKALRVLQNNNVDLVNIGSTDIVDGNHK |
| | | | LTLGLIWNIILHWQVKNVMKNIMAGLQQTNSEKIL |
| | | | LSWVRQSTRNYPQVNVINFTTSWSDGLALNALIHS |
| | | | HRPDLFDWNSVVCQQSATORLEHAFNIARYQLGIE |
| | | | KLLDPEDVDTTYPDKKSILMYITSLFQVLPQQVSI |
| | | | EAIQEVEMLPRPPKVTKEEHFQLHHQMHYSQQITV |
| | | | SLAQGYERTSSPKPRFKSYAYTQAAYVTTSDPTRS |
| | | | PFPSQHLEAPEDKSFGSSLMESEVNLDRYQTALEE |
| | | | VLSWLLSAEDTLQAQGEISNDVEVVKDQFHTHEGY |
| | | | MMDLTAHQGRVGNILQLGSKLIGTGKLSEDEETEV |
| | | | QEQMNLLNSRWECLRVASMEKQSNLHRVLMDLQNQ |
| | | | KLKELNDWLTKTEERTRKMEEEPLGPDLEDLKRQV |
| | | | QQHKVLQEDLEQEQVRVNSLTHMVVVVDESSGDHA |
| | | | TAALEEQLKVLGDRWANICRWTEDRWVLLQDILLK |
| | | | WQRLTEEQCLFSAWLSEKEDAVNKIHTTGFKDQNE |
| | | | MLSSLQKLAVLKADLEKKKQSMGKLYSLKQDLLST |
| | | | LKNKSVTQKTEAWLDNFARCWDNLVQKLEKSTAQI |
| | | | SQAVTTTQPSLTQTTVMETVTTVTTREQILVKHAQ |
| | | | EELPPPPPQKKRQITVDSEIRKRLDVDITELHSWI |
| | | | TRSEAVLQSPEFAIFRKEGNFSDLKEKVNAIEREK |
| | | | AEKFRKLQDASRSAQALVEQMVNEGVNADSIKQAS |
| | | | EQLNSRWIEFCOLLSERLNWLEYQNNIIAFYNQLQ |
| | | | QLEQMTTTAENWLKIQPTTPSEPTAIKSQLKICKD |
| | | | EVNRLSDLQPQIERLKIQSIALKEKGQGPMELDAD |
| | | | FVAFTNHFKQVESDVQAREKELQTIFDTLPPMRYQ |
| | | | ETMSAIRTWVQQSETKLSIPQLSVTDYEIMEQRLG |
| | | | ELQALQSSLQEQQSGLYYLSTTVKEMSKKAPSEIS |
| | | | RKYQSEFEEIEGRWKKLSSQLVEHCQKLEEQMNKL |
| | | | RKIQNHIQTLKKWMAEVDVELKEEWPALGDSEILK |
| | | | KQLKQCRLLVSDIQTIQPSLNSVNEGGQKIKNEAE |
| | | | PEFASRLETELKELNTQWDHMCQQVYARKEALKGG |
| | | | LEKTVSLQKDLSEMHEWMTQAEEEYLERDFEYKTP |
| | | | DELQKAVEEMKRAKEEAQQKEAKVKLLTESVNSVI |
| | | | AQAPPVAQEALKKELETLTTNYQWLCTRLNGKCKT |
| | | | LEEVWACWHELLSYLEKANKWLNEVEFKLKTTENI |
| | | | PGGAEEISEVLDSLENLMRHSEDNPNQIRILAQTL |
| | | | TDGGVMDELINEELETENSRWRELHEEAVRRQKLL |
| | | | EQSIQSAQETEKSLHLIQESLTFIDKQLAAYIADK |
| | | | VDAAQMPQEAQKIQSDLTSHEISLEEMKKHNQGKE |
| | | | AAQRVLSQIDVAQKKLQDVSMKERLFQKPANFEQR |
| | | | LQESKMILDEVKMHLPALETKSVEQEVVQSQLNHC |
| | | | VNLYKSLSEVKSEVEMVIKTGRQIVQKKQTENPKE |
| | | | LDERVTALKLHYNELGAKVTERKQQLEKCLKLSRK |
| | | | MRKEMNVLTEWLAATDMELTKRSAVEGMPSNLDSE |
| | | | VAWGKATQKEIEKQKVHLKSITEVGEALKTVLGKK |
| | | | ETLVEDKLSLLNSNWIAVTSRAEEWLNLLLEYQKH |
| | | | METFDQNVDHITKWIIQADTLLDESEKKKPQQKED |
| | | | VLKRLKAELNDIRPKVDSTRDQAANLMANRGDHCR |
| | | | KLVEPQISELNHRFAAISHRIKTGKASIPLKELEQ |
| | | | FNSDIQKLLEPLEAEIQQGVNLKEEDENKDMNEDN |
| | | | EGTVKELLQRGDNLQQRITDERKREEIKIKQQLLQ |
| | | | TKHNALKDLRSQRRKKALEISHOWYQYKRQADDLL |
| | | | KCLDDIEKKLASLPEPRDERKIKEIDRELQKKKEE |
| | | | LNAVRRQAEGLSEDGAAMAVEPTQIQLSKRWREIE |
| | | | SKFAQFRRLNFAQIHTVREETMMVMTEDMPLEISY |
| | | | VPSTYLTEITHVSQALLEVEQLLNAPDLCAKDFED |
| | | | LFKQEESLKNIKDSLQQSSGRIDIIHSKKTAALQS |
| | | | ATPVERVKLQEALSQLDFQWEKVNKMYKDRQGRED |
| | | | RSVEKWRRFHYDIKIFNQWLTEAEQFLRKTQIPEN |
| | | | WEHAKYKWYLKELQDGIGQRQTVVRTLNATGEEII |
| | | | QQSSKTDASILQEKLGSLNLRWQEVCKQLSDRKKR |
| | | | LEEQKNILSEFQRDLNEFVLWLEEADNIASIPLEP |
| | | | GKEQQLKEKLEQVKLLVEELPLRQGILKQLNETGG |
| | | | PVLVSAPISPEEQDKLENKLKQTNLQWIKVSRALP |
| | | | EKQGEIEAQIKDLGQLEKKLEDLEEQLNHLLLWLS |
| | | | PIRNQLEIYNQPNQEGPEDVKETEIAVQAKQPDVE |
| | | | EILSKGQHLYKEKPATQPVKRKLEDLSSEWKAVNR |
| | | | LLQELRAKQPDLAPGLTTIGASPTQTVTLVTQPVV |
| | | | TKETAISKLEMPSSLMLEVPALADENRAWTELTDW |
| | | | LSLLDQVIKSQRVMVGDLEDINEMIIKQKATMQDL |
| | | | EQRRPQLEELITAAQNLKNKTSNQEARTIITDRIE |
| | | | RIQNQWDEVQEHLQNRRQQLNEMLKDSTQWLEAKE |
| | | | EAEQVLGQARAKLESWKEGPYTVDAIQKKITETKQ |
| | | | LAKDLRQWQTNVDVANDLALKLLRDYSADDTRKVH |
| | | | MITENINASWRSIHKRVSEREAALEETHRLLQQFP |
| | | | LDLEKFLAWLTEAETTANVLQDATRKERLLEDSKG |
| | | | VKELMKQWQDLQGEIEAHTDVYHNLDENSQKILRS |
| | | | LEGSDDAVLLQRRLDNMNFKWSELRKKSLNIRSHL |
| | | | EASSDQWKRLHLSLQELLVWLQLKDDELSRQAPIG |
| | | | GDFPAVQKONDVHRAFKRELKTKEPVIMSTLETVR |
| | | | IFLTEQPLEGLEKLYQEPRELPPEERAQNVTRLLR |
| | | | KQAEEVNTEWEKLNLHSADWORKIDETLERLQELQ |
| | | | EATDELDLKLRQAEVIKGSWQPVGDLLIDSLQDHL |
| | | | EKVKALRGEIAPLKENVSHVNDLARQLTTLGIQLS |
| | | | PYNLSTLEDLNTRWKLLQVAVEDRVRQLHEAHRDE |
| | | | GPASQHELSTSVQGPWERAISPNKVPYYINHETQT |
| | | | TCWDHPKMTELYQSLADLNNVRESAYRTAMKLRRL |
| | | | QKALCLDLLSLSAACDALDQHNLKQNDQPMDILQI |
| | | | INCLTTIYDRLEQEHNNLVNVPLCVDMCLNWLLNV |
| | | | YDTGRTGRIRVLSEKTGIISLCKAHLEDKYRYLFK |
| | | | QVASSTGFCDQRRLGLLLHDSIQIPRQLGEVASFG |
| | | | GSNIEPSVRSCFQFANNKPEIEAALFLDWMRLEPQ |
| | | | SMVWLPVLHRVAAAETAKHQAKCNICKECPIIGER |
| | | | YRSLKHFNYDICQSCFFSGRVAKGHKMHYPMVEYC |
| | | | TPTTSGEDVRDFAKVLKNKERTKRYFAKHPRMGYL |
| | | | PVQTVLEGDNMETPVTLINFWPVDSAPASSPQLSH |
| | | | DDTHSRIEHYASRLAEMENSNGSYLNDSISPNESI |
| | | | DDEHLLIQHYCQSLNQDSPLSQPRSPAQILISLES |
| | | | EERGELERILADLEEENRNLQAEYDRLKQQHEHKG |
| | | | LSPLPSPPEMMPTSPQSPRDAELIAEAKLLRQHKG |
| | | | RLEARMQILEDHNKQLESQLHRLROLLEQPQAEAK |
| | | | VNGTTVSSPSTSLORSDSSQPMLLRVVGSQTSDSM |
| | | | GEEDLLSPPQDTSTGLEEVMEQLNNSFPSSRGRNT |
| | | | PGKPMREDTM |
| Glutamate | GRIN2B- | 228 | MKPRAECCSPKFWLVLAVLAVSGSRARSQKSPPSI |
| receptor | Related | | GIAVILVGTSDEVAIKDAHEKDDFHHLSVVPRVEL |
| ionotropic, | Disorder; | | VAMNETDPKSIITRICDLMSDRKIQGVVFADDTDQ |
| NMDA 2B | Epileptic | | EAIAQILDFISAQTLTPILGIHGGSSMIMADKDES |
| (GRIN2B) | encephalopathy, | | SMFFQFGPSIEQQASVMLNIMEEYDWYIFSIVTTY |
| Signal | early infantile, | | FPGYQDFVNKIRSTIENSFVGWELEEVLLLDMSLD |
| Sequence | 27 | | DGDSKIQNQLKKLQSPIILLYCTKEEATYIFEVAN |
| Underlined | | | SVGLTGYGYTWIVPSLVAGDTDTVPAEFPTGLISV |
| | | | SYDEWDYGLPARVRDGIAIITTAASDMLSEHSFIP |
| | | | EPKSSCYNTHEKRIYQSNMLNRYLINVTFEGRNLS |
| | | | FSEDGYQMHPKLVIILLNKERKWERVGKWKDKSLQ |
| | | | MKYYVWPRMCPETEEQEDDHLSIVTLEEAPFVIVE |
| | | | SVDPLSGTCMRNTVPCQKRIVTENKTDEEPGYIKK |
| | | | CCKGFCIDILKKISKSVKFTYDLYLVTNGKHGKKI |
| | | | NGTWNGMIGEVVMKRAYMAVGSLTINEERSEVVDE |
| | | | SVPFIETGISVMVSRSNGTVSPSAFLEPFSADVWV |
| | | | MMFVMLLIVSAVAVFVFEYFSPVGYNRCLADGREP |
| | | | GGPSFTIGKAIWLLWGLVENNSVPVQNPKGTTSKI |
| | | | MVSVWAFFAVIFLASYTANLAAFMIQEEYVDQVSG |
| | | | LSDKKFQRPNDESPPFRFGTVPNGSTERNIRNNYA |
| | | | EMHAYMGKFNQRGVDDALLSLKTGKLDAFIYDAAV |
| | | | LNYMAGRDEGCKLVTIGSGKVFASTGYGIAIQKDS |
| | | | GWKRQVDLAILQLEGDGEMEELEALWLTGICHNEK |
| | | | NEVMSSQLDIDNMAGVFYMLGAAMALSLITFICEH |
| | | | LFYWQFRHCFMGVCSGKPGMVFSISRGIYSCIHGV |
| | | | AIEERQSVMNSPTATMNNTHSNILRLLRTAKNMAN |
| | | | LSGVNGSPQSALDFIRRESSVYDISEHRRSFTHSD |
| | | | CKSYNNPPCEENLESDYISEVERTFGNLQLKDSNV |
| | | | YQDHYHHHHRPHSIGSASSIDGLYDCDNPPETTOS |
| | | | RSISKKPLDIGLPSSKHSQLSDLYGKESFKSDRYS |
| | | | GHDDLIRSDVSDISTHTVTYGNIEGNAAKRRKQQY |
| | | | KDSLKKRPASAKSRREFDEIELAYRRRPPRSPDHK |
| | | | RYFRDKEGLRDFYLDQFRTKENSPHWEHVDLTDIY |
| | | | KERSDDFKRDSVSGGGPCTNRSHIKHGTGDKHGVV |
| | | | SGVPAPWEKNLTNVEWEDRSGGNFCRSCPSKLHNY |
| | | | STTVTGQNSGRQACIRCEACKKAGNLYDISEDNSL |
| | | | QELDQPAAPVAVTSNASTTKYPQSPTNSKAQKKNR |
| | | | NKLRRQHSYDTFVDLQKEEAALAPRSVSLKDKGRF |
| | | | MDGSPYAHMFEMSAGESTFANNKSSVPTAGHHHHN |
| | | | NPGGGYMLSKSLYPDRVTQNPFIPTFGDDQCLLHG |
| | | | SKSYFFRQPTVAGASKARPDFRALVTNKPVVSALH |
| | | | GAVPARFQKDICIGNQSNPCVPNNKNPRAFNGSSN |
| | | | GHVYEKLSSIESDV |
| Cystic fibrosis | Cystic fibrosis | 229 | MQRSPLEKASVVSKLFFSWTRPILRKGYRORLELS |
| transmembrane | | | DIYQIPSVDSADNLSEKLEREWDRELASKKNPKLI |
| conductance | | | NALRRCFFWREMFYGIFLYLGEVTKAVQPLLLGRI |
| regulator | | | IASYDPDNKEERSIAIYLGIGLCLLFIVRTLLLHP |
| (CFTR) | | | AIFGLHHIGMQMRIAMESLIYKKTLKLSSRVLDKI |
| | | | SIGQLVSLLSNNLNKFDEGLALAHEVWIAPLQVAL |
| | | | LMGLIWELLQASAFCGLGFLIVLALFQAGLGRMMM |
| | | | KYRDQRAGKISERLVITSEMIENIQSVKAYCWEEA |
| | | | MEKMIENLRQTELKLTRKAAYVRYFNSSAFFFSGE |
| | | | FVVELSVLPYALIKGIILRKIFTTISFCIVLRMAV |
| | | | TRQFPWAVQTWYDSLGAINKIQDFLOKQEYKTLEY |
| | | | NLTTTEVVMENVTAFWEEGFGELFEKAKQNNNNRK |
| | | | TSNGDDSLFFSNFSLLGTPVLKDINFKIERGQLLA |
| | | | VAGSTGAGKTSLLMVIMGELEPSEGKIKHSGRISF |
| | | | CSQFSWIMPGTIKENIIFGVSYDEYRYRSVIKACQ |
| | | | LEEDISKFAEKDNIVLGEGGITLSGGQRARISLAR |
| | | | AVYKDADLYLLDSPFGYLDVLTEKEIFESCVCKLM |
| | | | ANKTRILVTSKMEHLKKADKILILHEGSSYFYGTE |
| | | | SELONLQPDFSSKLMGCDSFDQESAERRNSILTET |
| | | | LHRFSLEGDAPVSWTETKKQSFKQTGEFGEKRKNS |
| | | | ILNPINSIRKESIVQKTPLQMNGIEEDSDEPLERR |
| | | | LSLVPDSEQGEAILPRISVISTGPTLQARRRQSVL |
| | | | NLMTHSVNQGQNIHRKTTASTRKVSLAPQANLTEL |
| | | | DIYSRRLSQETGLEISEEINEEDLKECFEDDMESI |
| | | | PAVTTWNTYLRYITVHKSLIFVLIWCLVIFLAEVA |
| | | | ASLVVLWLLGNTPLQDKGNSTHSRNNSYAVIITST |
| | | | SSYYVFYIYVGVADTLLAMGFFRGLPLVHTLITVS |
| | | | KILHHKMLHSVLQAPMSTLNTLKAGGILNRFSKDI |
| | | | AILDDLLPLTIEDFIQLLLIVIGAIAVVAVLQPYI |
| | | | FVATVPVIVAFIMLRAYFLOTSQQLKOLESEGRSP |
| | | | IFTHLVTSLKGLWTLRAFGRQPYFETLFHKALNLH |
| | | | TANWFLYLSTLRWFQMRIEMIFVIFFIAVTFISIL |
| | | | TTGEGEGRVGIILTLAMNIMSTLQWAVNSSIDVDS |
| | | | LMRSVSRVFKFIDMPTEGKPTKSTKPYKNGQLSKV |
| | | | MIIENSHVKKDDIWPSGGQMTVKDLTAKYTEGGNA |
| | | | ILENISFSISPGQRVGLLGRTGSGKSTLLSAFLRL |
| | | | LNTEGEIQIDGVSWDSITLQQWRKAFGVIPQKVFI |
| | | | FSGTFRKNLDPYEQWSDQEIWKVADEVGLRSVIEQ |
| | | | FPGKLDFVLVDGGCVLSHGHKQLMCLARSVLSKAK |
| | | | ILLLDEPSAHLDPVTYQIIRRTLKQAFADCTVILC |
| | | | EHRIEAMLECQQFLVIEENKVRQYDSIQKLLNERS |
| | | | LFRQAISPSDRVKLEPHRNSSKCKSKPQIAALKEE |
| | | | TEEEVQDTRL |
| Sodium | Dravet | 230 | MEQTVLVPPGPDSENFFTRESLAAIERRIAEEKAK |
| channel protein | syndrome | | NPKPDKKDDDENGPKPNSDLEAGKNLPFIYGDIPP |
| type 1 subunit | | | EMVSEPLEDLDPYYINKKTFIVLNKGKAIFRESAT |
| alpha (SCN1A) | | | SALYILTPENPLRKIAIKILVHSLESMLIMCTILT |
| | | | NCVFMTMSNPPDWTKNVEYTFTGIYTFESLIKIIA |
| | | | RGFCLEDFTFLRDPWNWLDFTVITFAYVTEFVDLG |
| | | | NVSALRTFRVLRALKTISVIPGLKTIVGALIQSVK |
| | | | KLSDVMILTVFCLSVFALIGLQLEMGNLRNKCIQW |
| | | | PPTNASLEEHSIEKNITVNYNGTLINETVFEEDWK |
| | | | SYIQDSRYHYFLEGELDALLCGNSSDAGQCPEGYM |
| | | | CVKAGRNPNYGYTSFDTFSWAFLSLERLMTQDEWE |
| | | | NLYQLTLRAAGKTYMIFFVLVIFLGSFYLINLILA |
| | | | VVAMAYEEQNQATLEEAEQKEAEFQQMIEQLKKQQ |
| | | | EAAQQAATATASEHSREPSAAGRLSDSSSEASKLS |
| | | | SKSAKERRNRRKKRKQKEQSGGEEKDEDEFQKSES |
| | | | EDSIRRKGFRESIEGNRLTYEKRYSSPHQSLLSIR |
| | | | GSLFSPRRNSRTSLFSFRGRAKDVGSENDFADDEH |
| | | | STFEDNESRRDSLFVPRRHGERRNSNLSQTSRSSR |
| | | | MLAVFPANGKMHSTVDCNGVVSLVGGPSVPTSPVG |
| | | | QLLPEVIIDKPATDDNGTTTETEMRKRRSSSFHVS |
| | | | MDFLEDPSQRQRAMSIASILTNTVEELEESROKCP |
| | | | PCWYKFSNIFLIWDCSPYWLKVKHVVNLVVMDPFV |
| | | | DLAITICIVLNTLFMAMEHYPMTDHENNVLTVGNL |
| | | | VFTGIFTAEMELKIIAMDPYYYFQEGWNIEDGFIV |
| | | | TLSLVELGLANVEGLSVLRSERLLRVEKLAKSWPT |
| | | | LNMLIKIIGNSVGALGNLTLVLAIIVFIFAVVGMQ |
| | | | LFGKSYKDCVCKIASDCQLPRWHMNDFFHSFLIVE |
| | | | RVLCGEWIETMWDCMEVAGQAMCLTVFMMVMVIGN |
| | | | LVVLNLFLALLLSSFSADNLAATDDDNEMNNLQIA |
| | | | VDRMHKGVAYVKRKIYEFIQQSFIRKQKILDEIKP |
| | | | LDDLNNKKDSCMSNHTAEIGKDLDYLKDVNGTTSG |
| | | | IGTGSSVEKYIIDESDYMSFINNPSLTVTVPIAVG |
| | | | ESDFENLNTEDESSESDLEESKEKLNESSSSSEGS |
| | | | TVDIGAPVEEQPVVEPEETLEPEACFTEGCVQRFK |
| | | | CCQINVEEGRGKQWWNLRRTCFRIVEHNWFETFIV |
| | | | FMILLSSGALAFEDIYIDQRKTIKTMLEYADKVET |
| | | | YIFILEMLLKWVAYGYQTYFTNAWCWLDFLIVDVS |
| | | | LVSLTANALGYSELGAIKSLRTLRALRPLRALSRE |
| | | | EGMRVVVNALLGAIPSIMNVLLVCLIFWLIFSIMG |
| | | | VNLFAGKFYHCINTTTGDREDIEDVNNHTDCLKLI |
| | | | ERNETARWKNVKVNFDNVGFGYLSLLQVATFKGWM |
| | | | DIMYAAVDSRNVELQPKYEESLYMYLYFVIFIIFG |
| | | | SFFTLNLFIGVIIDNFNQQKKKFGGQDIEMTEEQK |
| | | | KYYNAMKKLGSKKPQKPIPRPGNKFQGMVFDFVTR |
| | | | QVFDISIMILICLNMVTMMVETDDQSEYVTTILSR |
| | | | INLVFIVLFTGECVLKLISLRHYYFTIGWNIFDFV |
| | | | VVILSIVGMFLAELIEKYFVSPTLERVIRLARIGR |
| | | | ILRLIKGAKGIRTLLFALMMSLPALENIGLLLFLV |
| | | | MFIYAIFGMSNFAYVKREVGIDDMENFETEGNSMI |
| | | | CLFQITTSAGWDGLLAPILNSKPPDCDPNKVNPGS |
| | | | SVKGDCGNPSVGIFFFVSYIIISELVVVNMYIAVI |
| | | | LENESVATEESAEPLSEDDFEMFYEVWEKEDPDAT |
| | | | QFMEFEKLSQFAAALEPPLNLPQPNKLQLIAMDLP |
| | | | MVSGDRIHCLDILFAFTKRVLGESGEMDALRIQME |
| | | | ERFMASNPSKVSYQPITTTLKRKQEEVSAVIIQRA |
| | | | YRRHLLKRTVKQASFTYNKNKIKGGANLLIKEDMI |
| | | | IDRINENSITEKTDLTMSTAACPPSYDRVTKPIVE |
| | | | KHEQEGKDEKAKGK |
| Copper- | Wilson disease | 231 | MPEQERQITAREGASRKILSKLSLPTRAWEPAMKK |
| transporting | | | SFAFDNVGYEGGLDGLGPSSQVATSTVRILGMTCQ |
| ATPase 2 | | | SCVKSIEDRISNLKGIISMKVSLEQGSATVKYVPS |
| (ATP7B) | | | VVCLQQVCHQIGDMGFEASIAEGKAASWPSRSLPA |
| | | | QEAVVKLRVEGMTCQSCVSSIEGKVRKLQGVVRVK |
| | | | VSLSNQEAVITYQPYLIQPEDLRDHVNDMGFEAAI |
| | | | KSKVAPLSLGPIDIERLQSTNPKRPLSSANQNENN |
| | | | SETLGHQGSHVVTLQLRIDGMHCKSCVLNIEENIG |
| | | | QLLGVQSIQVSLENKTAQVKYDPSCTSPVALQRAI |
| | | | EALPPGNFKVSLPDGAEGSGTDHRSSSSHSPGSPP |
| | | | RNQVQGTCSTTLIAIAGMTCASCVHSIEGMISQLE |
| | | | GVQQISVSLAEGTATVLYNPSVISPEELRAAIEDM |
| | | | GFEASVVSESCSTNPLGNHSAGNSMVQTTDGTPTS |
| | | | VQEVAPHTGRLPANHAPDILAKSPQSTRAVAPQKC |
| | | | FLQIKGMTCASCVSNIERNLQKEAGVLSVLVALMA |
| | | | GKAEIKYDPEVIQPLEIAQFIQDLGFEAAVMEDYA |
| | | | GSDGNIELTITGMTCASCVHNIESKLTRINGITYA |
| | | | SVALATSKALVKEDPEIIGPRDIIKIIEEIGFHAS |
| | | | LAQRNPNAHHLDHKMEIKQWKKSFLCSLVFGIPVM |
| | | | ALMIYMLIPSNEPHQSMVLDHNIIPGLSILNLIFF |
| | | | ILCTFVQLLGGWYFYVQAYKSLRHRSANMDVLIVL |
| | | | ATSIAYVYSLVILVVAVAEKAERSPVTFEDTPPML |
| | | | FVFIALGRWLEHLAKSKTSEALAKLMSLQATEATV |
| | | | VTLGEDNLIIREEQVPMELVQRGDIVKVVPGGKEP |
| | | | VDGKVLEGNTMADESLITGEAMPVTKKPGSTVIAG |
| | | | SINAHGSVLIKATHVGNDTTLAQIVKLVEEAQMSK |
| | | | APIQQLADRESGYFVPFIIIMSTLTLVVWIVIGFI |
| | | | DFGVVQRYFPNPNKHISQTEVIIRFAFQTSITVLC |
| | | | IACPCSLGLATPTAVMVGTGVAAQNGILIKGGKPL |
| | | | EMAHKIKTVMFDKTGTITHGVPRVMRVLLLGDVAT |
| | | | LPLRKVLAVVGTAEASSEHPLGVAVTKYCKEELGT |
| | | | ETLGYCTDFQAVPGCGIGCKVSNVEGILAHSERPL |
| | | | SAPASHLNEAGSLPAEKDAVPQTFSVLIGNREWLR |
| | | | RNGLTISSDVSDAMTDHEMKGQTAILVAIDGVLCG |
| | | | MIAIADAVKQEAALAVHTLQSMGVDVVLITGDNRK |
| | | | TARAIATQVGINKVFAEVLPSHKVAKVQELONKGK |
| | | | KVAMVGDGVNDSPALAQADMGVAIGTGTDVAIEAA |
| | | | DVVLIRNDLLDVVASIHLSKRTVRRIRINLVLALI |
| | | | YNLVGIPIAAGVEMPIGIVLQPWMGSAAMAASSVS |
| | | | VVLSSLQLKCYKKPDLERYEAQAHGHMKPLTASQV |
| | | | SVHIGMDDRWRDSPRATPWDQVSYVSQVSLSSLTS |
| | | | DKPSRHSAAADDDGDKWSLLLNGRDEEQYI |
| Potassium | KCNQ2-Related | 232 | MVQKSRNGGVYPGPSGEKKLKVGFVGLDPGAPDST |
| voltage-gated | Disorders | | RDGALLIAGSEAPKRGSILSKPRAGGAGAGKPPKR |
| channel | (Epileptic | | NAFYRKLONFLYNVLERPRGWAFIYHAYVELLVES |
| subfamily KQT | Encephalopathy) | | CLVLSVESTIKEYEKSSEGALYILEIVTIVVEGVE |
| member 2 | | | YFVRIWAAGCCCRYRGWRGRLKFARKPFCVIDIMV |
| (KCNQ2) | | | LIASIAVLAAGSQGNVFATSALRSLRELQILRMIR |
| | | | MDRRGGTWKLLGSVVYAHSKELVTAWYIGELCLIL |
| | | | ASFLVYLAEKGENDHEDTYADALWWGLITLTTIGY |
| | | | GDKYPQTWNGRLLAATFTLIGVSFFALPAGILGSG |
| | | | FALKVQEQHRQKHFEKRRNPAAGLIQSAWRFYATN |
| | | | LSRTDLHSTWQYYERTVTVPMYSSQTQTYGASRLI |
| | | | PPLNQLELLRNLKSKSGLAFRKDPPPEPSPSKGSP |
| | | | CRGPLCGCCPGRSSQKVSLKDRVESSPRGVAAKGK |
| | | | GSPQAQTVRRSPSADQSLEDSPSKVPKSWSFGDRS |
| | | | RARQAFRIKGAASRONSEEASLPGEDIVDDKSCPC |
| | | | EFVTEDLTPGLKVSIRAVCVMRFLVSKRKFKESLR |
| | | | PYDVMDVIEQYSAGHLDMLSRIKSLQSRVDQIVGR |
| | | | GPAITDKDRTKGPAEAELPEDPSMMGRLGKVEKQV |
| | | | LSMEKKLDELVNIYMQRMGIPPTETEAYFGAKEPE |
| | | | PAPPYHSPEDSREHVDRHGCIVKIVRSSSSTGQKN |
| | | | FSAPPAAPPVQCPPSTSWQPQSHPRQGHGTSPVGD |
| | | | HGSLVRIPPPPAHERSLSAYGGGNRASMEFLRQED |
| | | | TPGCRPPEGNLRDSDTSISIPSVDHEELERSFSGF |
| | | | SISQSKENLDALNSCYAAVAPCAKVRPYIAEGESD |
| | | | TDSDLCTPCGPPPRSATGEGPFGDVGWAGPRK |
| Sodium | SCN2A-Related | 233 | MAQSVLVPPGPDSFRFFTRESLAAIEQRIAEEKAK |
| channel protein | Disorders; | | RPKQERKDEDDENGPKPNSDLEAGKSLPFIYGDIP |
| type 2 subunit | Epileptic | | PEMVSVPLEDLDPYYINKKTFIVLNKGKAISRESA |
| alpha (SCN2A) | encephalopathy, | | TPALYILTPENPIRKLAIKILVHSLENMLIMCTIL |
| | early infantile, | | TNCVFMTMSNPPDWTKNVEYTFTGIYTFESLIKIL |
| | 11 | | ARGFCLEDETFLRDPWNWLDFTVITFAYVTEFVDL |
| | | | GNVSALRTERVLRALKTISVIPGLKTIVGALIQSV |
| | | | KKLSDVMILTVFCLSVFALIGLQLEMGNLRNKCLQ |
| | | | WPPDNSSFEINITSFENNSLDGNGTTENRTVSIEN |
| | | | WDEYIEDKSHFYFLEGQNDALLCGNSSDAGQCPEG |
| | | | YICVKAGRNPNYGYTSFDTESWAFLSLERLMTQDE |
| | | | WENLYQLTLRAAGKTYMIFFVLVIFLGSFYLINLI |
| | | | LAVVAMAYEEQNQATLEEAEQKEAEFQQMLEQLKK |
| | | | QQEEAQAAAAAASAESRDFSGAGGIGVFSESSSVA |
| | | | SKLSSKSEKELKNRRKKKKQKEQSGEEEKNDRVRK |
| | | | SESEDSIRRKGFRESLEGSRLTYEKRFSSPHQSLL |
| | | | SIRGSLFSPRRNSRASLESFRGRAKDIGSENDFAD |
| | | | DEHSTFEDNDSRRDSLFVPHRHGERRHSNVSQASR |
| | | | ASRVLPILPMNGKMHSAVDCNGVVSLVGGPSTLTS |
| | | | AGQLLPEGTTTETEIRKRRSSSYHVSMDLLEDPTS |
| | | | RQRAMSIASILTNTMEELEESRQKCPPCWYKFANM |
| | | | CLIWDCCKPWLKVKHLVNLVVMDPFVDLAITICIV |
| | | | LNTLFMAMEHYPMTEQFSSVLSVGNLVETGIFTAE |
| | | | MFLKIIAMDPYYYFQEGWNIFDGFIVSLSLMELGL |
| | | | ANVEGLSVLRSFRLLRVFKLAKSWPTLNMLIKIIG |
| | | | NSVGALGNLTLVLAIIVFIFAVVGMQLFGKSYKEC |
| | | | VCKISNDCELPRWHMHDFFHSFLIVERVLCGEWIE |
| | | | TMWDCMEVAGQTMCLTVFMMVMVIGNLVVLNLFLA |
| | | | LLLSSESSDNLAATDDDNEMNNLQIAVGRMQKGID |
| | | | FVKRKIREFIQKAFVRKQKALDEIKPLEDLNNKKD |
| | | | SCISNHTTIEIGKDLNYLKDGNGTTSGIGSSVEKY |
| | | | VVDESDYMSFINNPSLTVTVPIAVGESDFENLNTE |
| | | | EFSSESDMEESKEKLNATSSSEGSTVDIGAPAEGE |
| | | | QPEVEPEESLEPEACFTEDCVRKFKCCQISIEEGK |
| | | | GKLWWNLRKTCYKIVEHNWFETFIVEMILLSSGAL |
| | | | AFEDIYIEQRKTIKTMLEYADKVFTYIFILEMLLK |
| | | | WVAYGFQVYFTNAWCWLDFLIVDVSLVSLTANALG |
| | | | YSELGAIKSLRTLRALRPLRALSRFEGMRVVVNAL |
| | | | LGAIPSIMNVLLVCLIFWLIFSIMGVNLFAGKFYH |
| | | | CINYTTGEMFDVSVVNNYSECKALIESNQTARWKN |
| | | | VKVNFDNVGLGYLSLLQVATFKGWMDIMYAAVDSR |
| | | | NVELQPKYEDNLYMYLYFVIFIIFGSFFTLNLFIG |
| | | | VIIDNENQQKKKFGGQDIEMTEEQKKYYNAMKKLG |
| | | | SKKPQKPIPRPANKFQGMVFDFVTKQVEDISIMIL |
| | | | ICLNMVTMMVETDDQSQEMTNILYWINLVFIVLET |
| | | | GECVLKLISLRYYYFTIGWNIFDFVVVILSIVGME |
| | | | LAELIEKYFVSPTLERVIRLARIGRILRLIKGAKG |
| | | | IRTLLFALMMSLPALFNIGLLLFLVMFIYAIFGMS |
| | | | NFAYVKREVGIDDMENFETEGNSMICLFQITTSAG |
| | | | WDGLLAPILNSGPPDCDPDKDHPGSSVKGDCGNPS |
| | | | VGIFFFVSYIIISELVVVNMYIAVILENFSVATEE |
| | | | SAEPLSEDDFEMFYEVWEKFDPDATQFIEFAKLSD |
| | | | FADALDPPLLIAKPNKVQLIAMDLPMVSGDRIHCL |
| | | | DILFAFTKRVLGESGEMDALRIQMEERFMASNPSK |
| | | | VSYEPITTTLKRKQEEVSAIIIQRAYRRYLLKQKV |
| | | | KKVSSIYKKDKGKECDGTPIKEDTLIDKLNENSTP |
| | | | EKTDMTPSTTSPPSYDSVTKPEKEKFEKDKSEKED |
| | | | KGKDIRESKK |
| Voltage- | CACNA1A- | 234 | MARFGDEMPARYGGGGSGAAAGVVVGSGGGRGAGG |
| dependent P/Q- | Related | | SRQGGQPGAQRMYKQSMAQRARTMALYNPIPVRON |
| type calcium | Disorders; | | CLTVNRSLFLESEDNVVRKYAKKITEWPPFEYMIL |
| channel subunit | Episodic ataxia, | | ATIIANCIVLALEQHLPDDDKTPMSERLDDTEPYF |
| alpha-1A | type 2 | | IGIFCFEAGIKIIALGFAFHKGSYLRNGWNVMDEV |
| (CACNA1A) | | | VVLTGILATVGTEFDLRTLRAVRVLRPLKLVSGIP |
| | | | SLQVVLKSIMKAMIPLLQIGLLLFFAILIFAIIGL |
| | | | EFYMGKFHTTCFEEGTDDIQGESPAPCGTEEPART |
| | | | CPNGTKCOPYWEGPNNGITQFDNILFAVLTVFQCI |
| | | | TMEGWTDLLYNSNDASGNTWNWLYFIPLIIIGSFF |
| | | | MLNLVLGVLSGEFAKERERVENRRAFLKLRRQQQI |
| | | | ERELNGYMEWISKAEEVILAEDETDGEQRHPEDAL |
| | | | RRTTIKKSKTDLLNPEEAEDQLADIASVGSPFARA |
| | | | SIKSAKLENSTFFHKKERRMRFYIRRMVKTQAFYW |
| | | | TVLSLVALNTLCVAIVHYNQPEWLSDFLYYAEFIF |
| | | | LGLFMSEMFIKMYGLGTRPYFHSSENCEDCGVIIG |
| | | | SIFEVIWAVIKPGTSFGISVLRALRLLRIFKVTKY |
| | | | WASLRNLVVSLLNSMKSIISLLELLFLFIVVFALL |
| | | | GMQLFGGQFNFDEGTPPTNEDTFPAAIMTVFQILT |
| | | | GEDWNEVMYDGIKSQGGVQGGMVESIYFIVLTLFG |
| | | | NYTLLNVELAIAVDNLANAQELTKDEQEEEEAANQ |
| | | | KLALQKAKEVAEVSPLSAANMSIAVKEQQKNOKPA |
| | | | KSVWEQRTSEMRKONLLASREALYNEMDPDERWKA |
| | | | AYTRHLRPDMKTHLDRPLVVDPQENRNNNTNKSRA |
| | | | AEPTVDORLGQQRAEDELRKQARYHDRARDPSGSA |
| | | | GLDARRPWAGSQEAELSREGPYGRESDHHAREGSL |
| | | | EQPGFWEGEAERGKAGDPHRRHVHRQGGSRESRSG |
| | | | SPRTGADGEHRRHRAHRRPGEEGPEDKAERRARHR |
| | | | EGSRPARGGEGEGEGPDGGERRRRHRHGAPATYEG |
| | | | DARREDKERRHRRRKENQGSGVPVSGPNLSTTRPI |
| | | | QQDLGRQDPPLAEDIDNMKNNKLATAESAAPHGSL |
| | | | GHAGLPQSPAKMGNSTDPGPMLAIPAMATNPQNAA |
| | | | SRRTPNNPGNPSNPGPPKTPENSLIVINPSGTQTN |
| | | | SAKTARKPDHTTVDIPPACPPPLNHTVVQVNKNAN |
| | | | PDPLPKKEEEKKEEEEDDRGEDGPKPMPPYSSMFI |
| | | | LSTTNPLRRLCHYILNLRYFEMCILMVIAMSSIAL |
| | | | AAEDPVQPNAPRNNVLRYFDYVFTGVFTFEMVIKM |
| | | | IDLGLVLHQGAYFRDLWNILDFIVVSGALVAFAFT |
| | | | GNSKGKDINTIKSLRVLRVLRPLKTIKRLPKLKAV |
| | | | FDCVVNSLKNVFNILIVYMLFMFIFAVVAVQLEKG |
| | | | KFFHCTDESKEFEKDCRGKYLLYEKNEVKARDREW |
| | | | KKYEFHYDNVLWALLTLFTVSTGEGWPQVLKHSVD |
| | | | ATFENQGPSPGYRMEMSIFYVVYFVVFPFFFVNIF |
| | | | VALIIITFQEQGDKMMEEYSLEKNERACIDFAISA |
| | | | KPLTRHMPQNKQSFQYRMWQFVVSPPFEYTIMAMI |
| | | | ALNTIVLMMKFYGASVAYENALRVENIVETSLESL |
| | | | ECVLKVMAFGILNYFRDAWNIFDFVTVLGSITDIL |
| | | | VTEFGNNFINLSFLRLFRAARLIKLLRQGYTIRIL |
| | | | LWTFVQSFKALPYVCLLIAMLFFIYAIIGMQVEGN |
| | | | IGIDVEDEDSDEDEFQITEHNNERTFFQALMLLER |
| | | | SATGEAWHNIMLSCLSGKPCDKNSGILTRECGNEF |
| | | | AYFYFVSFIFLCSFLMLNLFVAVIMDNFEYLTRDS |
| | | | SILGPHHLDEYVRVWAEYDPAAWGRMPYLDMYQML |
| | | | RHMSPPLGLGKKCPARVAYKRLLRMDLPVADDNTV |
| | | | HFNSTLMALIRTALDIKIAKGGADKQQMDAELRKE |
| | | | MMAIWPNLSQKTLDLLVTPHKSTDLTVGKIYAAMM |
| | | | IMEYYRQSKAKKLQAMREEQDRTPLMFQRMEPPSP |
| | | | TQEGGPGQNALPSTQLDPGGALMAHESGLKESPSW |
| | | | VTQRAQEMFQKTGTWSPEQGPPTDMPNSQPNSQSV |
| | | | EMREMGRDGYSDSEHYLPMEGQGRAASMPRLPAEN |
| | | | QRRRGRPRGNNLSTISDTSPMKRSASVLGPKARRL |
| | | | DDYSLERVPPEENQRHHQRRRDRSHRASERSLGRY |
| | | | TDVDTGLGTDLSMTTQSGDLPSKERDQERGRPKDR |
| | | | KHRQHHHHHHHHHHPPPPDKDRYAQERPDHGRARA |
| | | | RDQRWSRSPSEGREHMAHRQGSSSVSGSPAPSTSG |
| | | | TSTPRRGRRQLPQTPSTPRPHVSYSPVIRKAGGSG |
| | | | PPQQQQQQQQQQQQQAVARPGRAATSGPRRYPGPT |
| | | | AEPLAGDRPPTGGHSSGRSPRMERRVPGPARSESP |
| | | | RACRHGGARWPASGPHVSEGPPGPRHHGYYRGSDY |
| | | | DEADGPGSGGGEEAMAGAYDAPPPVRHASSGATGR |
| | | | SPRTPRASGPACASPSRHGRRLPNGYYPAHGLARP |
| | | | RGPGSRKGLHEPYSESDDDWC |
| Sodium | SCN8A-Related | 235 | MAARLLAPPGPDSFKPFTPESLANIERRIAESKLK |
| channel protein | Disorders; | | KPPKADGSHREDDEDSKPKPNSDLEAGKSLPFIYG |
| type 8 subunit | Epileptic | | DIPQGLVAVPLEDFDPYYLTQKTFVVLNRGKTLER |
| alpha (SCN8A) | encephalopathy, | | FSATPALYILSPENLIRRIAIKILIHSVFSMIIMC |
| | early infantile, | | TILTNCVEMTFSNPPDWSKNVEYTFTGIYTFESLV |
| | 13 | | KIIARGFCIDGFTFLRDPWNWLDESVIMMAYITEF |
| | | | VNLGNVSALRTFRVLRALKTISVIPGLKTIVGALI |
| | | | QSVKKLSDVMILTVFCLSVFALIGLQLEMGNLRNK |
| | | | CVVWPINFNESYLENGTKGEDWEEYINNKTNFYTV |
| | | | PGMLEPLLCGNSSDAGQCPEGYQCMKAGRNPNYGY |
| | | | TSFDTESWAFLALFRLMTQDYWENLYQLTLRAAGK |
| | | | TYMIFFVLVIFVGSFYLVNLILAVVAMAYEEQNQA |
| | | | TLEEAEQKEAEFKAMLEQLKKQQEEAQAAAMATSA |
| | | | GTVSEDAIEEEGEEGGGSPRSSSEISKLSSKSAKE |
| | | | RRNRRKKRKQKELSEGEEKGDPEKVEKSESEDGMR |
| | | | RKAFRLPDNRIGRKESIMNQSLLSIPGSPELSRHN |
| | | | SKSSIFSFRGPGRERDPGSENEFADDEHSTVEESE |
| | | | GRRDSLFIPIRARERRSSYSGYSGYSQGSRSSRIF |
| | | | PSLRRSVKRNSTVDCNGVVSLIGGPGSHIGGRLLP |
| | | | EATTEVEIKKKGPGSLLVSMDQLASYGRKDRINSI |
| | | | MSVVTNTLVEELEESQRKCPPCWYKFANTFLIWEC |
| | | | HPYWIKLKEIVNLIVMDPFVDLAITICIVLNTLFM |
| | | | AMEHHPMTPQFEHVLAVGNLVETGIFTAEMELKLI |
| | | | AMDPYYYFQEGWNIFDGFIVSLSLMELSLADVEGL |
| | | | SVLRSFRLLRVFKLAKSWPTLNMLIKIIGNSVGAL |
| | | | GNLTLVLAIIVFIFAVVGMQLFGKSYKECVCKINQ |
| | | | DCELPRWHMHDFFHSFLIVERVLCGEWIETMWDCM |
| | | | EVAGQAMCLIVFMMVMVIGNLVVLNLFLALLLSSE |
| | | | SADNLAATDDDGEMNNLQISVIRIKKGVAWTKLKV |
| | | | HAFMQAHFKOREADEVKPLDELYEKKANCIANHTG |
| | | | ADIHRNGDFQKNGNGTTSGIGSSVEKYIIDEDHMS |
| | | | FINNPNLTVRVPIAVGESDFENLNTEDVSSESDPE |
| | | | GSKDKLDDTSSSEGSTIDIKPEVEEVPVEQPEEYL |
| | | | DPDACFTEGCVQRFKCCQVNIEEGLGKSWWILRKT |
| | | | CFLIVEHNWFETFIIFMILLSSGALAFEDIYIEQR |
| | | | KTIRTILEYADKVETYIFILEMLLKWTAYGFVKFF |
| | | | TNAWCWLDELIVAVSLVSLIANALGYSELGAIKSL |
| | | | RTLRALRPLRALSRFEGMRVVVNALVGAIPSIMNV |
| | | | LLVCLIFWLIFSIMGVNLFAGKYHYCFNETSEIRE |
| | | | EIEDVNNKTECEKLMEGNNTEIRWKNVKINEDNVG |
| | | | AGYLALLQVATFKGWMDIMYAAVDSRKPDEQPKYE |
| | | | DNIYMYIYFVIFIIFGSFFTLNLFIGVIIDNENQQ |
| | | | KKKFGGQDIFMTEEQKKYYNAMKKLGSKKPQKPIP |
| | | | RPLNKIQGIVFDFVTQQAFDIVIMMLICLNMVTMM |
| | | | VETDTQSKQMENILYWINLVFVIFFTCECVLKMFA |
| | | | LRHYYFTIGWNIFDFVVVILSIVGMFLADIIEKYF |
| | | | VSPTLERVIRLARIGRILRLIKGAKGIRTLLFALM |
| | | | MSLPALFNIGLLLFLVMFIFSIFGMSNFAYVKHEA |
| | | | GIDDMENFETEGNSMICLFQITTSAGWDGLLLPIL |
| | | | NRPPDCSLDKEHPGSGFKGDCGNPSVGIFFFVSYI |
| | | | IISFLIVVNMYIAIILENFSVATEESADPLSEDDE |
| | | | ETFYEIWEKFDPDATQFIEYCKLADFADALEHPLR |
| | | | VPKPNTIELIAMDLPMVSGDRIHCLDILFAFTKRV |
| | | | LGDSGELDILRQQMEERFVASNPSKVSYEPITTTL |
| | | | RRKQEEVSAVVLQRAYRGHLARRGFICKKTTSNKL |
| | | | ENGGTHREKKESTPSTASLPSYDSVTKPEKEKQQR |
| | | | AEEGRRERAKRQKEVRESKC |
| Glutamate | GRIN2A- | 236 | MGRVGYWTLLVLPALLVWRGPAPSAAAEKGPPALN |
| receptor | Related | | IAVMLGHSHDVTERELRTLWGPEQAAGLPLDVNVV |
| ionotropic, | Disorder; | | ALLMNRTDPKSLITHVCDLMSGARIHGLVFGDDTD |
| NMDA 2A | Epilepsy, focal, | | QEAVAQMLDFISSHTFVPILGIHGGASMIMADKDP |
| (GRIN2A) | with speech | | TSTFFQFGASIQQQATVMLKIMQDYDWHVESLVTT |
| Signal | disorder and | | IFPGYREFISFVKTTVDNSFVGWDMQNVITLDTSF |
| Sequence | with or without | | EDAKTQVQLKKIHSSVILLYCSKDEAVLILSEARS |
| Underlined | mental | | LGLTGYDFFWIVPSLVSGNTELIPKEFPSGLISVS |
| | retardation | | YDDWDYSLEARVRDGIGILTTAASSMLEKESYIPE |
| | | | AKASCYGQMERPEVPMHTLHPFMVNVTWDGKDLSF |
| | | | TEEGYQVHPRLVVIVLNKDREWEKVGKWENHTLSL |
| | | | RHAVWPRYKSFSDCEPDDNHLSIVTLEEAPFVIVE |
| | | | DIDPLTETCVRNTVPCRKFVKINNSTNEGMNVKKC |
| | | | CKGFCIDILKKLSRTVKFTYDLYLVTNGKHGKKVN |
| | | | NVWNGMIGEVVYQRAVMAVGSLTINEERSEVVDES |
| | | | VPFVETGISVMVSRSNGTVSPSAFLEPESASVWVM |
| | | | MFVMLLIVSAIAVFVFEYFSPVGYNRNLAKGKAPH |
| | | | GPSFTIGKAIWLLWGLVENNSVPVQNPKGTTSKIM |
| | | | VSVWAFFAVIFLASYTANLAAFMIQEEFVDQVTGL |
| | | | SDKKFORPHDYSPPFRFGTVPNGSTERNIRNNYPY |
| | | | MHQYMTKFNQKGVEDALVSLKTGKLDAFIYDAAVL |
| | | | NYKAGRDEGCKLVTIGSGYIFATTGYGIALQKGSP |
| | | | WKRQIDLALLQFVGDGEMEELETLWLTGICHNEKN |
| | | | EVMSSQLDIDNMAGVFYMLAAAMALSLITFIWEHL |
| | | | FYWKLRFCFTGVCSDRPGLLESISRGIYSCIHGVH |
| | | | IEEKKKSPDFNLTGSQSNMLKLLRSAKNISSMSNM |
| | | | NSSRMDSPKRAADFIQRGSLIMDMVSDKGNLMYSD |
| | | | NRSFQGKESIFGDNMNELQTFVANRQKDNLNNYVE |
| | | | QGQHPLTLNESNPNTVEVAVSTESKANSRPRQLWK |
| | | | KSVDSIRQDSLSQNPVSQRDEATAENRTHSLKSPR |
| | | | YLPEEMAHSDISETSNRATCHREPDNSKNHKTKDN |
| | | | FKRSVASKYPKDCSEVERTYLKTKSSSPRDKIYTI |
| | | | DGEKEPGFHLDPPQFVENVTLPENVDEPDPYQDPS |
| | | | ENFRKGDSTLPMNRNPLHNEEGLSNNDQYKLYSKH |
| | | | FTLKDKGSPHSETSERYRQNSTHCRSCLSNMPTYS |
| | | | GHFTMRSPFKCDACLRMGNLYDIDEDQMLQETGNP |
| | | | ATGEQVYQQDWAQNNALQLQKNKLRISRQHSYDNI |
| | | | VDKPRELDLSRPSRSISLKDRERLLEGNFYGSLES |
| | | | VPSSKLSGKKSSLFPQGLEDSKRSKSLLPDHTSDN |
| | | | PFLHSHRDDQRLVIGRCPSDPYKHSLPSQAVNDSY |
| | | | LRSSLRSTASYCSRDSRGHNDVYISEHVMPYAANK |
| | | | NNMYSTPRVLNSCSNRRVYKKMPSIESDV |
| Sodium- and | SLC6A1- | 237 | MATNGSKVADGQISTEVSEAPVANDKPKTLVVKVQ |
| chloride- | Related | | KKAADLPDRDTWKGREDFLMSCVGYAIGLGNVWRF |
| dependent | Disorder; | | PYLCGKNGGGAFLIPYFLTLIFAGVPLELLECSLG |
| GABA | Myoclonic- | | QYTSIGGLGVWKLAPMFKGVGLAAAVLSFWLNIYY |
| transporter 1 | atonic epilepsy | | IVIISWAIYYLYNSFTTTLPWKQCDNPWNTDRCES |
| (SLC6A1) | | | NYSMVNTTNMTSAVVEFWERNMHQMTDGLDKPGQI |
| | | | RWPLAITLAIAWILVYFCIWKGVGWTGKVVYFSAT |
| | | | YPYIMLIILFFRGVTLPGAKEGILFYITPNERKLS |
| | | | DSEVWLDAATQIFFSYGLGLGSLIALGSYNSFHNN |
| | | | VYRDSIIVCCINSCTSMFAGFVIFSIVGEMAHVTK |
| | | | RSIADVAASGPGLAFLAYPEAVTQLPISPLWAILF |
| | | | FSMLLMLGIDSQFCTVEGFITALVDEYPRLLRNRR |
| | | | ELFIAAVCIISYLIGLSNITQGGIYVEKLFDYYSA |
| | | | SGMSLLFLVFFECVSISWFYGVNRFYDNIQEMVGS |
| | | | RPCIWWKLCWSFFTPIIVAGVFIFSAVQMTPLTMG |
| | | | NYVFPKWGQGVGWLMALSSMVLIPGYMAYMELTLK |
| | | | GSLKQRIQVMVQPSEDIVRPENGPEQPQAGSSTSK |
| | | | EAYI |
| Sodium/ | Alternating | 238 | MGRGAGREYSPAATTAENGGGKKKQKEKELDELKK |
| potassium- | hemiplegia of | | EVAMDDHKLSLDELGRKYQVDLSKGLTNORAQDVL |
| transporting | childhood | | ARDGPNALTPPPTTPEWVKFCRQLEGGESILLWIG |
| ATPase | | | AILCFLAYGIQAAMEDEPSNDNLYLGVVLAAVVIV |
| subunit alpha-2 | | | TGCFSYYQEAKSSKIMDSFKNMVPQQALVIREGEK |
| (ATP1A2) | | | MQINAEEVVVGDLVEVKGGDRVPADLRIISSHGCK |
| Signal | | | VDNSSLTGESEPQTRSPEFTHENPLETRNICFEST |
| Sequence | | | NCVEGTARGIVIATGDRTVMGRIATLASGLEVGRT |
| Underlined | | | PIAMEIEHFIQLITGVAVELGVSFFVLSLILGYSW |
| | | | LEAVIFLIGIIVANVPEGLLATVTVCLTLTAKRMA |
| | | | RKNCLVKNLEAVETLGSTSTICSDKTGTLTQNRMT |
| | | | VAHMWFDNQIHEADTTEDQSGATFDKRSPTWTALS |
| | | | RIAGLCNRAVFKAGQENISVSKRDTAGDASESALL |
| | | | KCIELSCGSVRKMRDRNPKVAEIPENSTNKYQLSI |
| | | | HEREDSPQSHVLVMKGAPERILDRCSTILVQGKEI |
| | | | PLDKEMQDAFQNAYMELGGLGERVLGFCQLNLPSG |
| | | | KFPRGFKFDTDELNFPTEKLCFVGLMSMIDPPRAA |
| | | | VPDAVGKCRSAGIKVIMVTGDHPITAKAIAKGVGI |
| | | | ISEGNETVEDIAARLNIPMSQVNPREAKACVVHGS |
| | | | DLKDMTSEQLDEILKNHTEIVFARTSPQQKLIIVE |
| | | | GCQRQGAIVAVTGDGVNDSPALKKADIGIAMGISG |
| | | | SDVSKQAADMILLDDNFASIVTGVEEGRLIEDNLK |
| | | | KSIAYTLTSNIPEITPELLFIIANIPLPLGTVTIL |
| | | | CIDLGTDMVPAISLAYEAAESDIMKRQPRNSQTDK |
| | | | LVNERLISMAYGQIGMIQALGGFFTYFVILAENGE |
| | | | LPSRLLGIRLDWDDRTMNDLEDSYGQEWTYEQRKV |
| | | | VEFTCHTAFFASIVVVQWADLIICKTRRNSVFQQG |
| | | | MKNKILIFGLLEETALAAFLSYCPGMGVALRMYPL |
| | | | KVTWWFCAFPYSLLIFIYDEVRKLILRRYPGGWVE |
| | | | KETYY |
| Sodium/ | Alternating | 239 | MGDKKDDKDSPKKNKGKERRDLDDLKKEVAMTEHK |
| potassium- | hemiplegia of | | MSVEEVCRKYNTDCVQGLTHSKAQEILARDGPNAL |
| transporting | childhood 2 | | TPPPTTPEWVKFCRQLEGGESILLWIGAILCFLAY |
| ATPase | | | GIQAGTEDDPSGDNLYLGIVLAAVVIITGCESYYQ |
| subunit alpha-3 | | | EAKSSKIMESFKNMVPQQALVIREGEKMQVNAEEV |
| (ATP1A3) | | | VVGDLVEIKGGDRVPADLRIISAHGCKVDNSSLTG |
| | | | ESEPQTRSPDCTHDNPLETRNITFFSTNCVEGTAR |
| | | | GVVVATGDRTVMGRIATLASGLEVGKTPIAIEIEH |
| | | | FIQLITGVAVELGVSFFILSLILGYTWLEAVIFLI |
| | | | GIIVANVPEGLLATVTVCLTLTAKRMARKNCLVKN |
| | | | LEAVETLGSTSTICSDKTGTLTQNRMTVAHMWEDN |
| | | | QIHEADTTEDQSGTSFDKSSHTWVALSHIAGLCNR |
| | | | AVFKGGQDNIPVLKRDVAGDASESALLKCIELSSG |
| | | | SVKLMRERNKKVAEIPENSTNKYQLSIHETEDPND |
| | | | NRYLLVMKGAPERILDRCSTILLQGKEQPLDEEMK |
| | | | EAFQNAYLELGGLGERVLGFCHYYLPEEQFPKGFA |
| | | | FDCDDVNFTTDNLCFVGLMSMIDPPRAAVPDAVGK |
| | | | CRSAGIKVIMVTGDHPITAKAIAKGVGIISEGNET |
| | | | VEDIAARLNIPVSQVNPRDAKACVIHGTDLKDETS |
| | | | EQIDEILQNHTEIVFARTSPQQKLIIVEGCQRQGA |
| | | | IVAVTGDGVNDSPALKKADIGVAMGIAGSDVSKQA |
| | | | ADMILLDDNFASIVTGVEEGRLIFDNLKKSIAYTL |
| | | | TSNIPEITPELLFIMANIPLPLGTITILCIDLGTD |
| | | | MVPAISLAYEAAESDIMKRQPRNPRTDKLVNERLI |
| | | | SMAYGQIGMIQALGGFFSYFVILAENGELPGNLVG |
| | | | IRLNWDDRTVNDLEDSYGQQWTYEQRKVVEFTCHT |
| | | | AFFVSIVVVQWADLIICKTRRNSVFQQGMKNKILI |
| | | | FGLFEETALAAFLSYCPGMDVALRMYPLKPSWWFC |
| | | | AFPYSFLIFVYDEIRKLILRRNPGGWVEKETYY |
| Sodium | SCN9A | 240 | MAMLPPPGPQSFVHFTKQSLALIEQRIAERKSKEP |
| channel protein | Epilepsy; | | KEEKKDDDEEAPKPSSDLEAGKQLPFIYGDIPPGM |
| type 9 subunit | Epilepsy, | | VSEPLEDLDPYYADKKTFIVLNKGKTIFRENATPA |
| alpha | generalized, | | LYMLSPFSPLRRISIKILVHSLFSMLIMCTILTNC |
| (SCN9A) | with febrile | | IFMTMNNPPDWTKNVEYTFTGIYTFESLVKILARG |
| | seizures plus, | | FCVGEFTFLRDPWNWLDFVVIVFAYLTEFVNLGNV |
| | type 7 | | SALRTFRVLRALKTISVIPGLKTIVGALIQSVKKL |
| | | | SDVMILTVFCLSVFALIGLQLFMGNLKHKCERNSL |
| | | | ENNETLESIMNTLESEEDERKYFYYLEGSKDALLC |
| | | | GFSTDSGQCPEGYTCVKIGRNPDYGYTSEDTESWA |
| | | | FLALFRLMTQDYWENLYQQTLRAAGKTYMIFFVVV |
| | | | IFLGSFYLINLILAVVAMAYEEQNQANIEEAKQKE |
| | | | LEFQQMLDRLKKEQEEAEAIAAAAAEYTSIRRSRI |
| | | | MGLSESSSETSKLSSKSAKERRNRRKKKNQKKLSS |
| | | | GEEKGDAEKLSKSESEDSIRRKSFHLGVEGHRRAH |
| | | | EKRLSTPNQSPLSIRGSLFSARRSSRTSLFSFKGR |
| | | | GRDIGSETEFADDEHSIFGDNESRRGSLFVPHRPQ |
| | | | ERRSSNISQASRSPPMLPVNGKMHSAVDCNGVVSL |
| | | | VDGRSALMLPNGQLLPEVIIDKATSDDSGTTNQIH |
| | | | KKRRCSSYLLSEDMLNDPNLRQRAMSRASILTNTV |
| | | | EELEESRQKCPPWWYRFAHKFLIWNCSPYWIKFKK |
| | | | CIYFIVMDPFVDLAITICIVLNTLFMAMEHHPMTE |
| | | | EFKNVLAIGNLVFTGIFAAEMVLKLIAMDPYEYFQ |
| | | | VGWNIFDSLIVTLSLVELFLADVEGLSVLRSERLL |
| | | | RVFKLAKSWPTLNMLIKIIGNSVGALGNLTLVLAI |
| | | | IVFIFAVVGMQLFGKSYKECVCKINDDCTLPRWHM |
| | | | NDFFHSFLIVERVLCGEWIETMWDCMEVAGQAMCL |
| | | | IVYMMVMVIGNLVVLNLFLALLLSSESSDNLTAIE |
| | | | EDPDANNLQIAVTRIKKGINYVKQTLREFILKAFS |
| | | | KKPKISREIRQAEDLNTKKENYISNHTLAEMSKGH |
| | | | NFLKEKDKISGFGSSVDKHLMEDSDGQSFIHNPSL |
| | | | TVTVPIAPGESDLENMNAEELSSDSDSEYSKVRLN |
| | | | RSSSSECSTVDNPLPGEGEEAEAEPMNSDEPEACE |
| | | | TDGCVWRESCCQVNIESGKGKIWWNIRKTCYKIVE |
| | | | HSWFESFIVLMILLSSGALAFEDIYIERKKTIKII |
| | | | LEYADKIFTYIFILEMLLKWIAYGYKTYFTNAWCW |
| | | | LDFLIVDVSLVTLVANTLGYSDLGPIKSLRTLRAL |
| | | | RPLRALSRFEGMRVVVNALIGAIPSIMNVLLVCLI |
| | | | FWLIFSIMGVNLFAGKFYECINTTDGSREPASQVP |
| | | | NRSECFALMNVSQNVRWKNLKVNFDNVGLGYLSLL |
| | | | QVATFKGWTIIMYAAVDSVNVDKQPKYEYSLYMYI |
| | | | YFVVFIIFGSFFTLNLFIGVIIDNENQQKKKLGGQ |
| | | | DIFMTEEQKKYYNAMKKLGSKKPQKPIPRPGNKIQ |
| | | | GCIFDLVTNQAFDISIMVLICLNMVTMMVEKEGQS |
| | | | QHMTEVLYWINVVFIILFTGECVLKLISLRHYYFT |
| | | | VGWNIFDFVVVIISIVGMFLADLIETYFVSPTLER |
| | | | VIRLARIGRILRLVKGAKGIRTLLFALMMSLPALF |
| | | | NIGLLLFLVMFIYAIFGMSNFAYVKKEDGINDMEN |
| | | | FETFGNSMICLFQITTSAGWDGLLAPILNSKPPDC |
| | | | DPKKVHPGSSVEGDCGNPSVGIFYFVSYIIISELV |
| | | | VVNMYIAVILENFSVATEESTEPLSEDDFEMFYEV |
| | | | WEKFDPDATQFIEFSKLSDFAAALDPPLLIAKPNK |
| | | | VQLIAMDLPMVSGDRIHCLDILFAFTKRVLGESGE |
| | | | MDSLRSQMEERFMSANPSKVSYEPITTTLKRKQED |
| | | | VSATVIQRAYRRYRLRQNVKNISSIYIKDGDRDDD |
| | | | LLNKKDMAFDNVNENSSPEKTDATSSTTSPPSYDS |
| | | | VTKPDKEKYEQDRTEKEDKGKDSKESKK |
| Gamma- | GABRB3 | 241 | MWGLAGGRLFGIFSAPVLVAVVCCAQSVNDPGNMS |
| aminobutyric | Associated | | FVKETVDKLLKGYDIRLRPDFGGPPVCVGMNIDIA |
| acid receptor | Epilepsy | | SIDMVSEVNMDYTLTMYFQQYWRDKRLAYSGIPLN |
| subunit beta-3 | | | LTLDNRVADQLWVPDTYFLNDKKSFVHGVTVKNRM |
| (GABRB3) | | | IRLHPDGTVLYGLRITTTAACMMDLRRYPLDEQNC |
| Signal | | | TLEIESYGYTTDDIEFYWRGGDKAVTGVERIELPQ |
| Sequence | | | FSIVEHRLVSRNVVFATGAYPRLSLSERLKRNIGY |
| Underlined | | | FILQTYMPSILITILSWVSFWINYDASAARVALGI |
| | | | TTVLTMTTINTHLRETLPKIPYVKAIDMYLMGCFV |
| | | | FVFLALLEYAFVNYIFFGRGPQRQKKLAEKTAKAK |
| | | | NDRSKSESNRVDAHGNILLTSLEVHNEMNEVSGGI |
| | | | GDTRNSAISFDNSGIQYRKQSMPREGHGRELGDRS |
| | | | LPHKKTHLRRRSSQLKIKIPDLTDVNAIDRWSRIV |
| | | | FPFTFSLENLVYWLYYVN |
| Potassium | Heterotetramer- | 242 | MGLKARRAAGAAGGGGDGGGGGGGAANPAGGDAAA |
| voltage-gated | izes with KCNQ2 | | AGDEERKVGLAPGDVEQVTLALGAGADKDGTLLLE |
| channel | KCNQ2-Related | | GGGRDEGQRRTPQGIGLLAKTPLSRPVKRNNAKYR |
| subfamily KQT | Disorders | | RIQTLIYDALERPRGWALLYHALVFLIVLGCLILA |
| member 3 | (Epileptic | | VLTTFKEYETVSGDWLLLLETFAIFIFGAEFALRI |
| (KCNQ3) | Encephalopathy) | | WAAGCCCRYKGWRGRLKFARKPLCMLDIFVLIASV |
| | | | PVVAVGNQGNVLATSLRSLRFLQILRMLRMDRRGG |
| | | | TWKLLGSAICAHSKELITAWYIGELTLILSSELVY |
| | | | LVEKDVPEVDAQGEEMKEEFETYADALWWGLITLA |
| | | | TIGYGDKTPKTWEGRLIAATFSLIGVSFFALPAGI |
| | | | LGSGLALKVQEQHRQKHFEKRRKPAAELIQAAWRY |
| | | | YATNPNRIDLVATWRFYESVVSFPFFRKEQLEAAS |
| | | | SQKLGLLDRVRLSNPRGSNTKGKLFTPLNVDAIEE |
| | | | SPSKEPKPVGLNNKERFRTAFRMKAYAFWQSSEDA |
| | | | GTGDPMAEDRGYGNDEPIEDMIPTLKAAIRAVRIL |
| | | | QFRLYKKKFKETLRPYDVKDVIEQYSAGHLDMLSR |
| | | | IKYLQTRIDMIFTPGPPSTPKHKKSQKGSAFTFPS |
| | | | QQSPRNEPYVARPSTSEIEDQSMMGKFVKVERQVQ |
| | | | DMGKKLDFLVDMHMQHMERLQVQVTEYYPTKGTSS |
| | | | PAEAEKKEDNRYSDLKTIICNYSETGPPEPPYSFH |
| | | | QVTIDKVSPYGFFAHDPVNLPRGGPSSGKVQATPP |
| | | | SSATTYVERPTVLPILTLLDSRVSCHSQADLQGPY |
| | | | SDRISPRQRRSITRDSDTPLSLMSVNHEELERSPS |
| | | | GFSISQDRDDYVFGPNGGSSWMREKRYLAEGETDT |
| | | | DTDPFTPSGSMPLSSTGDGISDSVWTPSNKPI |
| Rhodopsin | Autosomal | 243 | MNGTEGPNFYVPFSNATGVVRSPFEYPQYYLAEPW |
| (RHO) | Dominant RP | | QFSMLAAYMFLLIVLGFPINFLTLYVTVQHKKLRT |
| | | | PLNYILLNLAVADLFMVLGGFTSTLYTSLHGYFVE |
| | | | GPTGCNLEGFFATLGGEIALWSLVVLAIERYVVVC |
| | | | KPMSNERFGENHAIMGVAFTWVMALACAAPPLAGW |
| | | | SRYIPEGLQCSCGIDYYTLKPEVNNESFVIYMFVV |
| | | | HFTIPMIIIFFCYGQLVFTVKEAAAQQQESATTQK |
| | | | AEKEVTRMVIIMVIAFLICWVPYASVAFYIFTHQG |
| | | | SNEGPIEMTIPAFFAKSAAIYNPVIYIMMNKQFRN |
| | | | CMLTTICCGKNPLGDDEASATVSKTETSQVAPA |
| Protein jagged- | Alagille | 244 | MRSPRTRGRSGRPLSLLLALLCALRAKVCGASGQF |
| 1 (JAG1) | syndrome 1 | | ELEILSMQNVNGELQNGNCCGGARNPGDRKCTRDE |
| Signal Peptide | | | CDTYFKVCLKEYQSRVTAGGPCSFGSGSTPVIGGN |
| Underlined | | | TFNLKASRGNDRNRIVLPESFAWPRSYTLLVEAWD |
| | | | SSNDTVQPDSIIEKASHSGMINPSRQWQTLKQNTG |
| | | | VAHFEYQIRVTCDDYYYGFGCNKFCRPRDDFFGHY |
| | | | ACDQNGNKTCMEGWMGPECNRAICRQGCSPKHGSC |
| | | | KLPGDCRCQYGWQGLYCDKCIPHPGCVHGICNEPW |
| | | | QCLCETNWGGQLCDKDLNYCGTHQPCLNGGTCSNT |
| | | | GPDKYQCSCPEGYSGPNCEIAEHACLSDPCHNRGS |
| | | | CKETSLGFECECSPGWTGPTCSTNIDDCSPNNCSH |
| | | | GGTCQDLVNGFKCVCPPQWTGKTCQLDANECEAKP |
| | | | CVNAKSCKNLIASYYCDCLPGWMGQNCDININDCL |
| | | | GQCQNDASCRDLVNGYRCICPPGYAGDHCERDIDE |
| | | | CASNPCLNGGHCQNEINRFQCLCPTGFSGNLCQLD |
| | | | IDYCEPNPCQNGAQCYNRASDYFCKCPEDYEGKNC |
| | | | SHLKDHCRTTPCEVIDSCTVAMASNDTPEGVRYIS |
| | | | SNVCGPHGKCKSQSGGKFTCDCNKGFTGTYCHENI |
| | | | NDCESNPCRNGGTCIDGVNSYKCICSDGWEGAYCE |
| | | | TNINDCSQNPCHNGGTCRDLVNDFYCDCKNGWKGK |
| | | | TCHSRDSQCDEATCNNGGTCYDEGDAFKCMCPGGW |
| | | | EGTTCNIARNSSCLPNPCHNGGTCVVNGESFTCVC |
| | | | KEGWEGPICAQNTNDCSPHPCYNSGTCVDGDNWYR |
| | | | CECAPGFAGPDCRININECQSSPCAFGATCVDEIN |
| | | | GYRCVCPPGHSGAKCQEVSGRPCITMGSVIPDGAK |
| | | | WDDDCNTCQCLNGRIACSKVWCGPRPCLLHKGHSE |
| | | | CPSGQSCIPILDDQCFVHPCTGVGECRSSSLQPVK |
| | | | TKCTSDSYYQDNCANITFTENKEMMSPGLTTEHIC |
| | | | SELRNLNILKNVSAEYSIYIACEPSPSANNEIHVA |
| | | | ISAEDIRDDGNPIKEITDKIIDLVSKRDGNSSLIA |
| | | | AVAEVRVQRRPLKNRTDFLVPLLSSVLTVAWICCL |
| | | | VTAFYWCLRKRRKPGSHTHSASEDNTTNNVREQLN |
| | | | QIKNPIEKHGANTVPIKDYENKNSKMSKIRTHNSE |
| | | | VEEDDMDKHQQKARFAKQPAYTLVDREEKPPNGTP |
| | | | TKHPNWTNKQDNRDLESAQSLNRMEYIV |
| Inositol 1,4,5- | Gillespie | 245 | MSDKMSSFLHIGDICSLYAEGSTNGFISTLGLVDD |
| trisphosphate | Syndrome | | RCVVQPETGDLNNPPKKERDCLFKLCPMNRYSAQK |
| receptor type 1 | | | QFWKAAKPGANSTTDAVLLNKLHHAADLEKKQNET |
| (ITPR1) | | | ENRKLLGTVIQYGNVIQLLHLKSNKYLTVNKRLPA |
| | | | LLEKNAMRVTLDEAGNEGSWFYIQPFYKLRSIGDS |
| | | | VVIGDKVVLNPVNAGQPLHASSHQLVDNPGCNEVN |
| | | | SVNCNTSWKIVLFMKWSDNKDDILKGGDVVRLFHA |
| | | | EQEKFLTCDEHRKKQHVFLRTTGRQSATSATSSKA |
| | | | LWEVEVVQHDPCRGGAGYWNSLFRFKHLATGHYLA |
| | | | AEVDPDFEEECLEFQPSVDPDQDASRSRLRNAQEK |
| | | | MVYSLVSVPEGNDISSIFELDPTTLRGGDSLVPRN |
| | | | SYVRLRHLCTNTWVHSTNIPIDKEEEKPVMLKIGT |
| | | | SPVKEDKEAFAIVPVSPAEVRDLDFANDASKVLGS |
| | | | IAGKLEKGTITQNERRSVTKLLEDLVYFVTGGINS |
| | | | GQDVLEVVFSKPNRERQKLMREQNILKQIFKLLQA |
| | | | PFTDCGDGPMLRLEELGDQRHAPFRHICRLCYRVL |
| | | | RHSQQDYRKNQEYIAKQFGFMQKQIGYDVLAEDTI |
| | | | TALLHNNRKLLEKHITAAEIDTEVSLVRKNREPRE |
| | | | LDYLSDLCVSMNKSIPVTQELICKAVLNPTNADIL |
| | | | IETKLVLSRFEFEGVSSTGENALEAGEDEEEVWLE |
| | | | WRDSNKEIRSKSVRELAQDAKEGQKEDRDVLSYYR |
| | | | YQLNLFARMCLDRQYLAINEISGOLDVDLILRCMS |
| | | | DENLPYDLRASFCRLMLHMHVDRDPQEQVTPVKYA |
| | | | RLWSEIPSEIAIDDYDSSGASKDEIKERFAQTMEF |
| | | | VEEYLRDVVCQRFPFSDKEKNKLTFEVVNLARNLI |
| | | | YFGFYNFSDLLRLTKILLAILDCVHVTTIFPISKM |
| | | | AKGEENKGNNDVEKLKSSNVMRSIHGVGELMTQVV |
| | | | LRGGGFLPMTPMAAAPEGNVKQAEPEKEDIMVMDT |
| | | | KLKIIEILQFILNVRLDYRISCLLCIFKREFDESN |
| | | | SQTSETSSGNSSQEGPSNVPGALDFEHIEEQAEGI |
| | | | FGGSEENTPLDLDDHGGRTFLRVLLHLTMHDYPPL |
| | | | VSGALQLLFRHFSQRQEVLQAFKQVQLLVTSQDVD |
| | | | NYKQIKQDLDQLRSIVEKSELWVYKGQGPDETMDG |
| | | | ASGENEHKKTEEGNNKPQKHESTSSYNYRVVKEIL |
| | | | IRLSKLCVQESASVRKSRKQQQRLLRNMGAHAVVL |
| | | | ELLQIPYEKAEDTKMQEIMRLAHEFLONFCAGNQQ |
| | | | NQALLHKHINLFLNPGILEAVTMQHIFMNNFQLCS |
| | | | EINERVVQHFVHCIETHGRNVQYIKFLQTIVKAEG |
| | | | KFIKKCQDMVMAELVNSGEDVLVFYNDRASFQTLI |
| | | | QMMRSERDRMDENSPLMYHIHLVELLAVCTEGKNV |
| | | | YTEIKCNSLLPLDDIVRVVTHEDCIPEVKIAYINE |
| | | | LNHCYVDTEVEMKEIYTSNHMWKLFENFLVDICRA |
| | | | CNNTSDRKHADSILEKYVTEIVMSIVTTFFSSPES |
| | | | DQSTTLQTRQPVFVQLLQGVFRVYHCNWLMPSQKA |
| | | | SVESCIRVLSDVAKSRAIAIPVDLDSQVNNLELKS |
| | | | HSIVQKTAMNWRLSARNAARRDSVLAASRDYRNII |
| | | | ERLQDIVSALEDRLRPLVQAELSVLVDVLHRPELL |
| | | | FPENTDARRKCESGGFICKLIKHTKQLLEENEEKL |
| | | | CIKVLQTLREMMTKDRGYGEKLISIDELDNAELPP |
| | | | APDSENATEELEPSPPLRQLEDHKRGEALRQVLVN |
| | | | RYYGNVRPSGRRESLTSFGNGPLSAGGPGKPGGGG |
| | | | GGSGSSSMSRGEMSLAEVQCHLDKEGASNLVIDLI |
| | | | MNASSDRVFHESILLAIALLEGGNTTIQHSFFCRL |
| | | | TEDKKSEKFFKVFYDRMKVAQQEIKATVTVNTSDL |
| | | | GNKKKDDEVDRDAPSRKKAKEPTTQITEEVRDQLL |
| | | | EASAATRKAFTTFRREADPDDHYQPGEGTQATADK |
| | | | AKDDLEMSAVITIMQPILRFLQLLCENHNRDLQNE |
| | | | LRCQNNKTNYNLVCETLQFLDCICGSTTGGLGLLG |
| | | | LYINEKNVALINQTLESLTEYCQGPCHENONCIAT |
| | | | HESNGIDIITALILNDINPLGKKRMDLVLELKNNA |
| | | | SKLLLAIMESRHDSENAERILYNMRPKELVEVIKK |
| | | | AYMQGEVEFEDGENGEDGAASPRNVGHNIYILAHQ |
| | | | LARHNKELQSMLKPGGQVDGDEALEFYAKHTAQIE |
| | | | IVRLDRTMEQIVFPVPSICEFLTKESKLRIYYTTE |
| | | | RDEQGSKINDFFLRSEDLENEMNWQKKLRAQPVLY |
| | | | WCARNMSFWSSISENLAVLMNLLVAFFYPFKGVRG |
| | | | GTLEPHWSGLLWTAMLISLAIVIALPKPHGIRALI |
| | | | ASTILRLIFSVGLQPTLELLGAFNVCNKIIFLMSE |
| | | | VGNCGTFTRGYRAMVLDVEFLYHLLYLVICAMGLE |
| | | | VHEFFYSLLLEDLVYREETLLNVIKSVTRNGRSII |
| | | | LTAVLALILVYLFSIVGYLFFKDDFILEVDRLPNE |
| | | | TAVPETGESLASEFLESDVCRVESGENCSSPAPRE |
| | | | ELVPAEETEQDKEHTCETLLMCIVTVLSHGLRSGG |
| | | | GVGDVLRKPSKEEPLFAARVIYDLLFFFMVIIIVL |
| | | | NLIFGVIIDTFADLRSEKQKKEEILKTTCFICGLE |
| | | | RDKFDNKTVTFEEHIKEEHNMWHYLCFIVLVKVKD |
| | | | STEYTGPESYVAEMIKERNLDWFPRMRAMSLVSSD |
| | | | SEGEQNELRNLQEKLESTMKLVTNLSGQLSELKDQ |
| | | | MTEQRKQKQRIGLLGHPPHMNVNPQQPA |
| Sugar | — | 294 | MEAGGFLDSLIYGACVVFTLGMFSAGLSDLRHMRM |
| transporter | | | TRSVDNVQFLPFLTTEVNNLGWLSYGALKGDGILI |
| SWEET1 | | | VVNTVGAALQTLYILAYLHYCPRKRVVLLQTATLL |
| (SLC50A1) | | | GVLLLGYGYFWLLVPNPEARLQQLGLFCSVETISM |
| | | | YLSPLADLAKVIQTKSTQCLSYPLTIATLLTSASW |
| | | | CLYGFRLRDPYIMVSNFPGIVTSFIRFWLFWKYPQ |
| | | | EQDRNYWLLQT |
| Transmembrane | — | 295 | MELEAMSRYTSPVNPAVFPHLTVVLLAIGMFFTAW |
| protein 258 | | | FFVYEVTSTKYTRDIYKELLISLVASLEMGFGVLE |
| (TMEM258) | | | LLLWVGIYV |
| Follicle- | Ovarian | 296 | MALLLVSLLAFLSLGSGCHHRICHCSNRVFLCQES |
| stimulating | dysgenesis 1 | | KVTEIPSDLPRNAIELRFVLTKLRVIQKGAFSGFG |
| hormone | (ODG1) | | DLEKIEISQNDVLEVIEADVESNLPKLHEIRIEKA |
| receptor | | | NNLLYINPEAFQNLPNLQYLLISNTGIKHLPDVHK |
| (FSHR) | | | IHSLQKVLLDIQDNINIHTIERNSFVGLSFESVIL |
| Signal | | | WLNKNGIQEIHNCAFNGTQLDELNLSDNNNLEELP |
| Sequence | | | NDVFHGASGPVILDISRTRIHSLPSYGLENLKKLR |
| Underlined | | | ARSTYNLKKLPTLEKLVALMEASLTYPSHCCAFAN |
| | | | WRRQISELHPICNKSILRQEVDYMTQARGORSSLA |
| | | | EDNESSYSRGFDMTYTEFDYDLCNEVVDVTCSPKP |
| | | | DAFNPCEDIMGYNILRVLIWFISILAITGNIIVLV |
| | | | ILTTSQYKLTVPRELMCNLAFADLCIGIYLLLIAS |
| | | | VDIHTKSQYHNYAIDWQTGAGCDAAGFFTVFASEL |
| | | | SVYTLTAITLERWHTITHAMQLDCKVQLRHAASVM |
| | | | VMGWIFAFAAALFPIFGISSYMKVSICLPMDIDSP |
| | | | LSQLYVMSLLVLNVLAFVVICGCYIHIYLTVRNPN |
| | | | IVSSSSDTRIAKRMAMLIFTDELCMAPISFFAISA |
| | | | SLKVPLITVSKAKILLVLFHPINSCANPFLYAIFT |
| | | | KNFRRDFFILLSKCGCYEMQAQIYRTETSSTVHNT |
| | | | HPRNGHCSSAPRVTNGSTYILVPLSHLAQN |

### 5.3.3 Orientation and Linkers

[0220] In some embodiments, the effector domain is N-terminal of the targeting domain in the fusion protein. In some embodiments, the targeting domain is N-terminal of the effector domain in the fusion protein. In some embodiments, the effector domain is operably connected (directly or indirectly) to the C terminus of the targeting domain. In some embodiments, the effector domain is operably connected (directly or indirectly) to the N terminus of the targeting domain. In some embodiments, the effector domain is directly operably connected to the C terminus of the targeting domain. In some embodiments, the effector domain is directly operably connected to the N terminus of the targeting domain.

[0221] In some embodiments, the effector domain is indirectly operably connected to the C terminus of the targeting domain. In some embodiments, the effector domain is indirectly operably connected to the N terminus of the targeting domain. One or more amino acid sequences comprising e.g., a linker, or encoding one or more polypeptides may be positioned between the effector moiety and the targeting moiety. In some embodiments, the effector domain is indirectly operably connected to the C terminus of the targeting domain through a peptide linker. In some embodiments, the effector domain is indirectly operably connected to the N terminus of the targeting domain through a peptide linker.

[0222] Each component of the fusion protein described herein can be directly linked to the other to indirectly linked to the other via a peptide linker.

[0223] Any suitable peptide linker known in the art can be used that enables the effector domain and the targeting domain to bind their respective antigens. In some embodiments, the linker is one or any combination of a cleavable linker, a non-cleavable linker, a peptide linker, a flexible linker, a rigid linker, a helical linker, or a non-helical linker. In some embodiments, the linker is a peptide linker. In some embodiments, the linker is a peptide linker that comprises glycine or serine, or both glycine and serine amino acid residues. In some embodiments, the peptide linker comprises from about 1-20, 1-15, 1-10, 1-5, 5-20, 5-15, 5-10, or 15-20 amino acids. In some embodiments, the peptide linker comprises from or from about 2-25, 5-25, 10-25, 15-25, 20-25, 2-20, 5-20, 10-20, 15-20, 2-15, 5-15, 10-15, 2-10, or 5-10 amino acids. In some embodiments, the linker is a peptide linker that consists of glycine or serine, or both glycine and serine amino acid residues. In some embodiments, the peptide linker consists of from or from about 2-25, 5-25, 10-25, 15-25, 20-25, 2-20, 5-20, 10-20, 15-20, 2-15, 5-15, 10-15, 2-10, or 5-10 amino acids. In some embodiments, the peptide linker comprises at least 2, 3, 4, 5, 6, 7, 8, 9, 10, 11, 12, 13, 14, 15, 16, 17, 18, 19, 20, 21, 22, 23, 24, 25, 26, 27, 28, 29, or 30 amino acid residues. In some embodiments, the linker is at least 11 amino acids in length. In some embodiments, the linker is at least 15 amino acids in length. In some embodiments, the linker is 10, 11, 12, 13, 14, 15, 16, 17, 18, 19, 20, 21, 22, 23, 24, 25, 26, 27, 28, 29, or 30 amino acid residues in length.

[0224] In some embodiments, the linker is a glycine/serine linker, e.g., a peptide linker substantially consisting of the amino acids glycine and serine. In some embodiments, the linker is a glycine/serine/proline linker, e.g., a peptide linker substantially consisting of the amino acids glycine, serine, and proline.

[0225] In some embodiments, the amino acid sequence of the linker comprises the amino acid sequence of any one of SEQ ID NOS: 297-424, or the amino acid sequence of any one of SEQ ID NOS: 297-424 comprising 1, 2, or 3 amino acid modifications (e.g., a substitution, deletion, or addition). In some embodiments, the amino acid sequence of the linker consists of the amino acid sequence of any one of SEQ ID NOS: 297-424, or the amino acid sequence of any one of SEQ ID NOS: 297-424 comprising 1, 2, or 3 amino acid modifications (e.g., a substitution, deletion, or addition).

[0226] In some embodiments, the amino acid sequence of the linker comprises the amino acid sequence of any one of SEQ ID NOS: 297-306, or the amino acid sequence of any one of SEQ ID NOS: 297-288 comprising 1, 2, or 3 amino acid modifications (e.g., a substitution, deletion, or addition). In some embodiments, the amino acid sequence of the linker consists of the amino acid sequence of any one of SEQ ID NOS: 297-306, or the amino acid sequence of any one of SEQ ID NOS: 297-306 comprising 1, 2, or 3 amino acid modifications (e.g., a substitution, deletion, or addition).

[0227] The amino acid sequence of exemplary linkers for use in any one or more of the fusion proteins described herein is provided in Table 3 below.

TABLE 3
Amino Acid Sequence of Exemplary Linkers

| | SEQ |
|---|---|
| Amino Acid Sequence | ID NO |
| GGGGSGGGGSGGGGSGGGGSGGGGS | 297 |
| GGGGSGGGGSGGGGSGGGGS | 298 |
| GGGGSGGGGSGGGGS | 299 |
| GGGGSGGGGS | 300 |
| GGGGS | 301 |
| SGGGGSGGGGSGGGGS | 302 |
| SGGGGSGGGGSGGGG | 303 |
| SGGGGSGGGG | 304 |
| SGGGG | 305 |
| GGSGG | 306 |
| AHFKISGEKRPSTDPGKKAKNPKKKKKKDP | 307 |
| AHRAKKMSKTHA | 308 |
| ASPEYVNLPINGNG | 309 |
| CTKRPRW | 310 |
| DKAKRVSRNKSEKKRR | 311 |
| EELRLKEELLKGIYA | 312 |
| EEQLRRRKNSRLNNTG | 313 |
| EVLKVIRTGKRKKKAWKRMVTKVC | 314 |
| HHHHHHHHHHHHQPH | 315 |
| HKKKHPDASVNFSEFSK | 316 |
| HKRTKKNLS | 317 |
| IINGRKLKLKKSRRRSSQTSNNSFTSRRS | 318 |
| KAEQERRK | 319 |
| KEKRKRREELFIEQKKRK | 320 |
| KKGKDEWFSRGKKP | 321 |
| KKGPSVQKRKKTNLS | 322 |
| KKKTVINDLLHYKKEK | 323 |
| KKNGGKGKNKPSAKIKK | 324 |
| KKPKWDDFKKKKK | 325 |
| KKRKKDNLS | 326 |
| KKRRKRRRK | 327 |
| KKRRRRARK | 328 |
| KKSKRGR | 329 |
| KKSRKRGS | 330 |
| KKSTALSRELGKIMRRR | 331 |
| KKSYQDPEIIAHSRPRK | 332 |
| KKTGKNRKLKSKRVKTR | 333 |
| KKVSIAGQSGKLWRWKR | 334 |
| KKYENVVIKRSPRKRGRPRK | 335 |
| KNKKRK | 336 |
| KPKKKR | 337 |
| KRAMKDDSHGNSTSPKRRK | 338 |
| KRANSNLVAAYEKAKKK | 339 |
| KRASEDTTSGSPPKKSSAGPKR | 340 |
| KRFKRRWMVRKMKTKK | 341 |
| KRGLNSSFETSPKKVK | 342 |
| KRGNSSIGPNDLSKRKQRKK | 343 |
| KRIHSVSLSQSQIDPSKKVKRAK | 344 |
| KRKGKLKNKGSKRKK | 345 |
| KRRRRRRREKRKR | 346 |
| KRSNDRTYSPEEEKQRRA | 347 |
| KRTVATNGDASGAHRAKKMSK | 348 |
| KRVYNKGEDEQEHLPKGKKR | 349 |
| KSGKAPRRRAVSMDNSNK | 350 |
| KVNFLDMSLDDIIIYKELE | 351 |
| KVQHRIAKKTTRRRR | 352 |
| LSPSLSPL | 353 |
| MDSLLMNRRKFLYQFKNVRWAKGRRETYLC | 354 |
| MPQNEYIELHRKRYGYRLDYHEKKRKKESREAHERSKKAKK | 355 |
| MIGLKAKLYHK | |
| MVQLRPRASR | 356 |
| NNKLLAKRRKGGASPKDDPMDDIK | 357 |
| NYKRPMDGTYGPPAKRHEGE | 358 |
| PDTKRAKLDSSETTMVKKK | 359 |
| PEKRTKI | 360 |
| PGGRGKKK | 361 |
| PGKMDKGEHRQERRDRPY | 362 |
| PKKGDKYDKTD | 363 |
| PKKKSRK | 364 |
| PKKNKPE | 365 |
| PKKRAKV | 366 |
| PKPKKLKVE | 367 |
| PKRGRGR | 368 |
| PKRRLVDDA | 369 |
| PKRRRTY | 370 |
| PLEKRR | 371 |
| PLRKAKR | 372 |
| PPAKRKCIF | 373 |
| PPARRRRL | 374 |
| PPKKKRKV | 375 |
| PPNKRMKVKH | 376 |
| PPRIYPQLPSAPT | 377 |
| PQRSPFPKSSVKR | 378 |
| PRPRKVPR | 379 |
| PRRRVQRKR | 380 |
| PRRVRLK | 381 |
| PSRKRPR | 382 |
| PSSKKRKV | 383 |
| PTKKRVK | 384 |
| QRPGPYDRP | 385 |
| RGKGGKGLGKGGAKRHRK | 386 |
| RKAGKGGGGHKTTKKRSAKDEKVP | 387 |
| RKIKLKRAK | 388 |
| RKIKRKRAK | 389 |
| RKKEAPGPREELRSRGR | 390 |
| RKKRKGK | 391 |
| RKKRRQRRR | 392 |
| RKKSIPLSIKNLKRKHKRKKNKITR | 393 |
| RKLVKPKNTKMKTKLRTNPY | 394 |
| RKRLILSDKGQLDWKK | 395 |
| RKRLKSK | 396 |
| RKRRVRDNM | 397 |
| RKRSPKDKKEKDLDGAGKRRKT | 398 |
| RKRTPRVDGQTGENDMNKRRRK | 399 |
| RLPVRRRRRR | 400 |
| RLRFRKPKSK | 401 |
| RQQRKR | 402 |
| RRDLNSSFETSPKKVK | 403 |
| RRDRAKLR | 404 |
| RRGDGRRR | 405 |
| RRGRKRKAEKQ | 406 |
| RRKKRR | 407 |
| RRKRSKSEDMDSVESKRRR | 408 |
| RRKRSR | 409 |
| RRPKGKTLQKRKPK | 410 |
| RRRGFERFGPDNMGRKRK | 411 |
| RRRGKNKVAAQNCRK | 412 |
| RRRKRRNLS | 413 |
| RRRQKQKGGASRRR | 414 |
| RRRREGPRARRRR | 415 |
| RRTIRLKLVYDKCDRSCKIQKKNRNKCQYCRFHKCLSVGMS | 416 |
| HNAIREGRMPRSEKAKLKAE | |
| RRVPQRKEVSRCRKCRK | 417 |
| RVGGRRQAVECIEDLLNEPGQPLDLSCKRPRP | 418 |
| RVVKLRIAP | 419 |
| RVVRRR | 420 |
| SKRKTKISRKTR | 421 |
| SYVKTVPNRTRTYIKL | 422 |
| TGKNEAKKRKIA | 423 |
| TLSPASSPSSVSCPVIPASTDESPGSALNI | 424 |

### 5.3.3.1 Conditional Constructs

[0228] Also described herein are constructs that comprise a targeting domain (e.g., a VHH, (VHH)₂) bound to an effector domain (e.g., an effector domain that comprises a catalytic domain of an deubiquitinase, or an effector domain that comprises a deubiquitinase). In some embodiments, the association of the targeting domain and the effector domain is mediated by binding of a first agent (e.g., a small molecule, protein, or peptide) attached to the targeting domain and a second agent (e.g., a small, molecule, protein, or peptide) attached to the effector domain. For example, in one embodiment, the targeting domain may be attached to a first agent that specifically binds to a second agent that is attached to the effector domain. In some embodiments, specific binding of the first agent to the second agent is mediated by addition of a third agent (e.g., a small molecule).

[0229] For example, a conditional construct includes an KBP/FRB-based dimerization switch, e.g., as described in US20170081411 (the entire contents of which are incorporated by reference herein), can be utilized herein. FKBP12 (FKBP or FK506 binding protein) is an abundant cytoplasmic protein that serves as the initial intracellular target for the natural product immunosuppressive drug, rapamycin. Rapamycin binds to FKBP and to the large PI3K homolog FRAP (RAFT, mTOR), thereby acting to dimerize these molecules. In some embodiments, an FKBP/FRAP based switch, also referred to herein as an FKBP/FRB based switch, can utilize a heterodimerization molecule, e.g., rapamycin or a rapamycin analog. FRB is a 93 amino acid portion of FRAP, that is sufficient for binding the FKBP-rapamycin complex (Chen, J., Zheng, X. F., Brown, E. J. & Schreiber, S. L. (1995) Identification of an 11-kDa FKBP12-rapamycin-binding domain within the 289-kDa FKBP12-rapamycin-associated protein and characterization of a critical serine residue. Proc Natl Acad Sci USA 92: 4947-51), the entire contents of which is incorporated by reference herein. For example, the targeting domain can be attached to FKBP and the effector domain attached to FRB. Thereby, the association of the targeting domain and the effector domain is mediated by rapamycin and only takes place in the presence of rapamycin.

[0230] Exemplary conditional activation systems that can be used here include, but are not limited to those described in US20170081411; Lajoie M J, et al. Designed protein logic to target cells with precise combinations of surface antigens. Science. 2020 Sep. 25; 369(6511):1637-1643. doi: 10.1126/science.aba6527. Epub 2020 Aug. 20. PMID: 32820060; Farrants H, et al. Chemogenetic Control of Nanobodies. Nat Methods. 2020 March; 17(3):279-282. doi: 10.1038/s41592-020-0746-7. Epub 2020 Feb. 17. PMID: 32066961; and US20170081411, the entire contents of each of which is incorporated by reference herein for all purposes.

### 5.3.4 Exemplary Fusion Proteins

[0231] Exemplary fusion proteins of the present disclosure include, but are not limited to, those described below. In one embodiment, the fusion protein comprises an effector domain comprising a catalytic domain of a cysteine protease deubiquitinase, or a functional fragment or functional variant thereof; and a targeting domain comprising a targeting moiety that specifically binds a membrane protein, wherein the membrane protein is GRIN2B, CFTR, SCN1A, ATP7B, KCNQ2, SCN2A, CACNA1A, SLC2A1, SCN8A, PRRT2, GRIN2A, SLC6A1, USH2A, ATP1A2, ATP1A3, SCN9A, PCDH19, GABRB3, TSC2, TSC1, KCNQ3, DMD, RHO, JAG1, ITPR1, SLC50A1, TMEM258, or FSHR.

[0232] In one embodiment, the fusion protein comprises an effector domain comprising a catalytic domain of a metalloprotease deubiquitinase, or a functional fragment or functional variant thereof; and a targeting domain comprising a targeting moiety that specifically binds a membrane protein, wherein the membrane protein is GRIN2B, CFTR, SCN1A, ATP7B, KCNQ2, SCN2A, CACNA1A, SLC2A1, SCN8A, PRRT2, GRIN2A, SLC6A1, USH2A, ATP1A2, ATP1A3, SCN9A, PCDH19, GABRB3, TSC2, TSC1, KCNQ3, DMD, RHO, JAG1, ITPR1, SLC50A1, TMEM258, or FSHR.

[0233] In one embodiment, the fusion protein comprises an effector domain comprising a catalytic domain of a deubiquitinase, or a functional fragment or functional variant thereof, wherein the deubiquitinase is a ubiquitin-specific protease (USP), a ubiquitin C-terminal hydrolase (UCH), a Machado-Josephin domain protease (MJD), an ovarian tumour protease (OTU), a MINDY protease, or a ZUFSP protease; and a targeting domain comprising a targeting moiety that specifically binds a membrane protein, wherein the membrane protein is GRIN2B, CFTR, SCN1A, ATP7B, KCNQ2, SCN2A, CACNA1A, SLC2A1, SCN8A, PRRT2, GRIN2A, SLC6A1, USH2A, ATP1A2, ATP1A3, SCN9A, PCDH19, GABRB3, TSC2, TSC1, KCNQ3, DMD, RHO, JAG1, ITPR1, SLC50A1, TMEM258, or FSHR1.

[0234] In one embodiment, the fusion protein comprises an effector domain comprising a catalytic domain of a deubiquitinase, or a functional fragment or functional variant thereof, wherein the deubiquitinase is selected from the group consisting of USP1, USP2, USP3, USP4, USP5, USP6, USP7, USP8, USP9X, USP9Y, USP10, USP11, USP12, USP13, USP14, USP15, USP16, USP17, USP17L2, USP17L3, USP17L4, USP17L5, USP17L7, USP17L8, USP18, USP19, USP20, USP21, USP22, USP23, USP24, USP25, USP26, USP27X, USP28, USP29, USP30, USP31, USP32, USP33, USP34, USP35, USP36, USP37, USP38, USP39, USP40, USP41, USP42, USP43, USP44, USP45, USP46, BAP1, UCHL1, UCHL3, UCHL5, ATXN3 ATXN3L, OTUB1, OTUB2 MINDY1, MINDY2, MINDY3, MINDY4, or ZUP1; and a targeting domain comprising a targeting moiety that specifically binds a membrane protein, wherein the membrane protein is GRIN2B, CFTR, SCN1A, ATP7B, KCNQ2, SCN2A, CACNA1A, SLC2A1, SCN8A, PRRT2, GRIN2A, SLC6A1, USH2A, ATP1A2, ATP1A3, SCN9A, PCDH19, GABRB3, TSC2, TSC1, KCNQ3, DMD, RHO, JAG1, ITPR1, SLC50A1, TMEM258, or FSHR.

[0235] In one embodiment, the fusion protein comprises an effector domain comprising a catalytic domain of a deubiquitinase, or a functional fragment or functional variant thereof, wherein the deubiquitinase is described in Table 1; and a targeting domain comprising a targeting moiety that specifically binds a membrane protein, wherein the membrane protein is GRIN2B, CFTR, SCN1A, ATP7B, KCNQ2, SCN2A, CACNA1A, SLC2A1, SCN8A, PRRT2, GRIN2A, SLC6A1, USH2A, ATP1A2, ATP1A3, SCN9A, PCDH19, GABRB3, TSC2, TSC1, KCNQ3, DMD, RHO, JAG1, ITPR1, SLC50A1, TMEM258, or FSHR.

[0236] In one embodiment, the fusion protein comprises an effector domain comprising a catalytic domain of a deubiquitinase, or a functional fragment or functional variant thereof, wherein the catalytic domain is described in Table 1; and a targeting domain comprising a targeting moiety that specifically binds a membrane protein, wherein the membrane protein is GRIN2B, CFTR, SCN1A, ATP7B, KCNQ2, SCN2A, CACNA1A, SLC2A1, SCN8A, PRRT2, GRIN2A, SLC6A1, USH2A, ATP1A2, ATP1A3, SCN9A, PCDH19, GABRB3, TSC2, TSC1, KCNQ3, DMD, RHO, JAG1, ITPR1, SLC50A1, TMEM258, or FSHR.

[0237] In one embodiment, the fusion protein comprises an effector domain comprising a catalytic domain of a deubiquitinase, or a functional fragment or functional variant thereof, wherein the deubiquitinase comprises an amino acid sequence at least 80%, 81%, 82%, 83%, 84%, 85%, 86%, 87%, 88%, 89%, 90%, 91%, 92%, 93%, 94%, 95%, 96%, 97%, 98%, 99%, or 100% identical to any one of SEQ ID NOS: 1-112; and a targeting domain comprising a targeting moiety that specifically binds a membrane protein, wherein the membrane protein is GRIN2B, CFTR, SCN1A, ATP7B, KCNQ2, SCN2A, CACNA1A, SLC2A1, SCN8A, PRRT2, GRIN2A, SLC6A1, USH2A, ATP1A2, ATP1A3, SCN9A, PCDH19, GABRB3, TSC2, TSC1, KCNQ3, DMD, RHO, JAG1, ITPR1, SLC50A1, TMEM258, or FSHR.

[0238] In one embodiment, the fusion protein comprises an effector domain comprising a catalytic domain of a deubiquitinase, or a functional fragment or functional variant thereof, wherein the catalytic domain comprises an amino acid sequence at least 80%, 81%, 82%, 83%, 84%, 85%, 86%, 87%, 88%, 89%, 90%, 91%, 92%, 93%, 94%, 95%, 96%, 97%, 98%, 99%, or 100% identical to any one of SEQ ID NOS: 113-220 or 293; and a targeting domain comprising a targeting moiety that specifically binds a membrane protein, wherein the membrane protein is GRIN2B, CFTR, SCN1A, ATP7B, KCNQ2, SCN2A, CACNA1A, SLC2A1, SCN8A, PRRT2, GRIN2A, SLC6A1, USH2A, ATP1A2, ATP1A3, SCN9A, PCDH19, GABRB3, TSC2, TSC1, KCNQ3, DMD, RHO, JAG1, ITPR1, SLC50A1, TMEM258, or FSHR.

[0239] In one embodiment, the fusion protein comprises an effector domain comprising a catalytic domain of a deubiquitinase, or a functional fragment or functional variant thereof, wherein the deubiquitinase comprises an amino acid sequence at least 80%, 81%, 82%, 83%, 84%, 85%, 86%, 87%, 88%, 89%, 90%, 91%, 92%, 93%, 94%, 95%, 96%, 97%, 98%, 99%, or 100% identical to any one of SEQ ID NOS: 1-112; and a targeting domain comprising a targeting moiety that specifically binds a membrane protein, wherein the membrane protein comprises an amino acid sequence at least 90%, 91%, 92%, 93%, 94%, 95%, 96%, 97%, 98%, 99%, or 100% identical to any one of SEQ ID NOS: 221-245 or 294-296.

[0240] In one embodiment, the fusion protein comprises an effector domain comprising a catalytic domain of a deubiquitinase, or a functional fragment or functional variant thereof, wherein the catalytic domain comprises an amino acid sequence at least 80%, 81%, 82%, 83%, 84%, 85%, 86%, 87%, 88%, 89%, 90%, 91%, 92%, 93%, 94%, 95%, 96%, 97%, 98%, 99%, or 100% identical to any one of SEQ ID NOS: 113-220 or 293; and a targeting domain comprising a targeting moiety that specifically binds a membrane protein, wherein the membrane protein comprises an amino acid sequence at least 90%, 91%, 92%, 93%, 94%, 95%, 96%, 97%, 98%, 99%, or 100% identical to any one of SEQ ID NOS: 221-245 or 294-296.

### 5.3.4.1 Additional Exemplary Embodiments

[0241] Additional exemplary embodiments of fusion proteins described herein are provided below, which should not be construed as limiting.

[0242] Embodiment 1. A fusion protein comprising: (a) an effector moiety comprising a functional fragment of a human deubiquitinase that is capable of mediating deubiquitination, wherein the human deubiquitinase comprises an amino acid sequence at least 80%, 81%, 82%, 83%, 84%, 85%, 86%, 87%, 88%, 89%, 90%, 95%, 96%, 97%, 98%, 99%, or 100% identical to the amino acid sequence of any one of SEQ ID NOS: 1-112, and a targeting moiety comprising a VHH, (VHH)₂, or scFv that specifically binds to a membrane protein.

[0243] Embodiment 2. A fusion protein comprising an effector moiety comprising a functional fragment of a human deubiquitinase that is capable of mediating deubiquitination that comprises an amino acid sequence at least 80%, 81%, 82%, 83%, 84%, 85%, 86%, 87%, 88%, 89%, 90%, 95%, 96%, 97%, 98%, 99%, or 100% identical to the amino acid sequence of any one of SEQ ID NOS: 113-220 or 293, and a targeting moiety comprising a VHH, (VHH)₂, or scFv that specifically binds to a membrane protein.

[0244] Embodiment 3. A fusion protein comprising an effector moiety comprising a functional fragment of a human deubiquitinase that is capable of mediating deubiquitination that comprises an amino acid sequence at least 80%, 81%, 82%, 83%, 84%, 85%, 86%, 87%, 88%, 89%, 90%, 95%, 96%, 97%, 98%, 99%, or 100% identical to the amino acid sequence of SEQ ID NO: 293, and a targeting moiety comprising a VHH, (VHH)₂, or scFv that specifically binds to a membrane protein.

[0245] Embodiment 4. The fusion protein of any one of Embodiments 1-3, wherein said targeting moiety is a VHH or (VHH)₂.

[0246] Embodiment 5. The fusion protein of any one of Embodiments 1-4, wherein said membrane protein is GRIN2B, CFTR, SCN1A, ATP7B, KCNQ2, SCN2A, CACNA1A, SLC2A1, SCN8A, PRRT2, GRIN2A, SLC6A1, USH2A, ATP1A2, ATP1A3, SCN9A, PCDH19, GABRB3, TSC2, TSC1, KCNQ3, DMD, RHO, JAG1, ITPR1, SLC50A1, TMEM258, or FSHR.

[0247] Embodiment 6. The fusion protein of any one of Embodiments 1-3, wherein the membrane protein is SCN1A, GRIN2B, SLC50A1, TMEM258, or FSHR.

### 5.3.5 Methods of Making Fusion Proteins

[0248] Fusion proteins described herein can be made by any conventional technique known in the art, for example, recombinant techniques or chemical synthesis (e.g., solid phase peptide synthesis). In some embodiments, the fusion protein is made through recombinant expression in a cell (e.g., a eukaryotic cell, e.g., a mammalian cell). Briefly, the fusion protein can be made by synthesizing the DNA encoding the fusion protein and cloning the DNA into any suitable expression vector. Numerous cloning vectors are known to those of skill in the art, and the selection of an appropriate cloning vector is a matter of choice. The gene can be placed under the control of a promoter, ribosome binding site (for bacterial expression) and, optionally, an operator and/or one or more enhancer elements, so that the DNA sequence encoding the fusion protein is transcribed into RNA in the host cell transformed by a vector containing this expression construction. The coding sequence may or may not contain a signal peptide or leader sequence. Heterologous leader sequences can be added to the coding sequence that causes the secretion of the expressed polypeptide from the host organism. Other regulatory sequences may also be desirable which allow for regulation of expression of the protein sequences relative to the growth of the host cell. Such regulatory sequences are known to those of skill in the art, and examples include those which cause the expression of a gene to be turned on or off in response to a chemical or physical stimulus, including the presence of a regulatory compound. Other types of regulatory elements may also be present in the vector, for example, enhancer sequences. The control sequences and other regulatory sequences may be ligated to the coding sequence prior to insertion into a vector, such as the cloning vectors described above. Alternatively, the coding sequence can be cloned directly into an expression vector which already contains the control sequences and an appropriate restriction site.

[0249] The expression vector may then be used to transform an appropriate host cell. A number of mammalian cell lines are known in the art and include immortalized cell lines available from the American Type Culture Collection (ATCC), such as, but not limited to, Chinese hamster ovary (CHO) cells, CHO-suspension cells (CHO-S), HeLa cells, HEK293, baby hamster kidney (BHK) cells, monkey kidney cells (COS), VERO, HepG2, MadinDarby bovine kidney (MDBK) cells, NOS, U2OS, A549, HT1080, CAD, P19, NIH3T3, L929, N2a, MCF-7, Y79, SO-Rb50, DUKX-X11, and J558L.

[0250] Depending on the expression system and host selected, the fusion protein is produced by growing host cells transformed by an expression vector described above under conditions whereby the fusion protein is expressed. The fusion protein is then isolated from the host cells and purified. If the expression system secretes the fusion protein into growth media, the fusion protein can be purified directly from the media. If the fusion protein is not secreted, it is isolated from cell lysates. The selection of the appropriate growth conditions and recovery methods are within the skill of the art. Once purified, the amino acid sequences of the fusion proteins can be determined, i.e., by repetitive cycles of Edman degradation, followed by amino acid analysis by HPLC. Other methods of amino acid sequencing are also known in the art. Once purified, the functionality of the fusion protein can be assessed, e.g., as described herein, e.g., utilizing a bifunctional ELISA.

[0251] As described above, functionality of the fusion protein can be tested by any method known in the art. Each functionality can be measured in a separate assay. For example, binding of the targeting domain to the target protein can be measure using an enzyme linked immunosorbent assay (ELISA). Catalytic activity of the effector domain can be measured using any standard deubiquitinase activity assay known in the art. For example, BioVision Deubiquitinase Activity Assay Kit (Fluorometric) Catalog #K485-100 according to the manufacturer's instructions. The deubiquitinase activity of a fusion protein described herein can be measured for example by using a fluorescent deubiquitinase substrate to detect deubiquitinase activity upon cleavage of the fluorescent substrate. The deubiquitinase activity can also be measured according to the materials and methods set forth in the Examples provided herein.

### 5.4 Nucleic Acids, Host Cells, Vectors, and Viral Particles

[0252] In one aspect, provided herein are nucleic acid molecules encoding a fusion protein described herein. In some embodiments, the nucleic acid molecule is a DNA molecule. In some embodiments, the nucleic acid molecule is an RNA molecule. In some embodiments, the nucleic acid molecule contains at least one modified nucleic acid (e.g., that increases stability of the nucleic acid molecule), e.g., phosphorothioate, N6-methyladenosine (m6A), N6,2′-O-dimethyladenosine (m6Am), 8-oxo-7,8-dihydroguanosine (8-oxoG), pseudouridine (Ψ), 5-methylcytidine (m5C), and N4-acetylcytidine (ac4C).

[0253] In one aspect, provided herein is a host cell (or population of host cells) comprising a nucleic acid encoding a fusion protein described herein. In some embodiments, the nucleic acid is incorporated into the genome of the host cell. In some embodiments, the nucleic acid is not incorporated into the genome of the host cell. In some embodiments, the nucleic acid is present in the cell episomally. In some embodiments, the host cell is a human cell. In some embodiments, the host cell is a mammalian cell. In some embodiments, the host cell is a mouse, rat, hamster, guinea pig, cat, dog, or human cell. In some embodiments, the host cell is modified in vitro, ex vivo, or in vivo.

[0254] The nucleic acid can be introduced into the host cell by any suitable method known in the art (e.g., as described herein). For example, a viral delivery system (e.g., a retrovirus, an adenovirus, an adeno associated virus, a herpes virus, a lentivirus, a pox virus, a vaccinia virus, a vesicular stomatitis virus, a polio virus, a Newcastle's Disease virus, an Epstein-Barr virus, an influenza virus, a reoviruses, a myxoma virus, a maraba virus, a rhabdovirus, or a coxsackie virus delivery system) can be utilized to deliver a nucleic acid (e.g., DNA or RNA molecule) encoding the fusion protein for expression with the host cell. In some embodiments, the nucleic acid encoding the fusion protein is present episomally within the host cell. In some embodiments, the nucleic acid encoding the fusion protein is incorporated into the genome of the host cell. In some embodiments, the virus replication competent. In some embodiments, the virus is replication deficient.

[0255] In some embodiments, a nucleic acid (DNA or RNA) is delivered to the host cell using a non-viral vector (e.g., a plasmid) encoding the fusion protein. In some embodiments, the nucleic acid encoding the fusion protein is present episomally within the host cell. In some embodiments, the nucleic acid encoding the fusion protein is incorporated into the genome of the host cell. Exemplary non-viral transfection methods known in the art include, but are not limited to, direct delivery of DNA such as by ex vivo transfection, by injection (e.g., microinjection), electroporation, liposome mediated transfection, receptor-mediated transfection, microprojectile bombardment, by agitation with silicon carbide fibers Through the application of techniques such as these cells may be stably or transiently transfected with a nucleic acid encoding a fusion protein described herein to express the encoded fusion protein.

[0256] In one aspect, provided herein are vectors comprising a nucleic acid encoding a fusion protein described herein (e.g., a nucleic acid described herein). In some embodiments, the vector is a viral vector. Exemplary viral vectors include, but are not limited to, retroviral vectors, adenoviral vectors, adeno associated viral vectors, herpes viral vectors, lentiviral vectors, pox viral vectors, vaccinia viral vectors, vesicular stomatitis viral vectors, polio viral vectors, Newcastle's Disease viral vectors, Epstein-Barr viral vectors, influenza viral vectors, reovirus vectors, myxoma viral vectors, maraba viral vectors, rhabdoviral vectors, and coxsackie viral vectors. In some embodiments, the vector is a non-viral vector. In some embodiments, the non-viral vector is a plasmid.

[0257] In one aspect, provided herein is a viral particle (or population of viral particles) that comprise a nucleic acid encoding a fusion protein described herein (e.g., a nucleic acid described herein). In some embodiments, the viral particle is an RNA virus. In some embodiments, the viral particle is a DNA virus. In some embodiments, the viral particle comprises a double stranded genome. In some embodiments, the viral particle comprises a single stranded genome. Exemplary viral particles include, but are not limited to, a retrovirus, an adenovirus, an adeno associated virus, a herpes virus, a lentivirus, a pox virus, a vaccinia virus, a vesicular stomatitis virus, a polio virus, a Newcastle's Disease virus, an Epstein-Barr virus, an influenza virus, a reoviruses, a myxoma virus, a maraba virus, a rhabdovirus, or a coxsackie.

### 5.5 Pharmaceutical Compositions

[0258] In one aspect, provided herein are pharmaceutical compositions comprising 1) a fusion protein described herein, a nucleic acid encoding a fusion protein described herein, a vector comprising a nucleic acid encoding a fusion protein described herein, or a viral particle comprising a nucleic acid encoding a fusion protein described herein; and 2) at least one pharmaceutically acceptable carrier, excipient, stabilizer buffer, diluent, surfactant, preservative and/or adjuvant, etc (see, e.g., Remington's Pharmaceutical Sciences (1990) Mack Publishing Co., Easton, PA). A person of ordinary skill in the art can select suitable excipient for inclusion in the pharmaceutical composition. For example, the formulation of the pharmaceutical composition may differ based on the route of administration (e.g., intravenous, subcutaneous, etc.), and/or the active molecule contained within the pharmaceutical composition (e.g., a viral particle, a non-viral vector, a nucleic acid not contained within a vector).

[0259] Acceptable carriers, excipients, or stabilizers are preferably nontoxic to recipients at the dosages and concentrations employed, and include buffers such as phosphate, citrate, or other organic acids; antioxidants including ascorbic acid or methionine; preservatives (such as octadecyldimethylbenzyl ammonium chloride; hexamethonium chloride; benzalkonium chloride, benzethonium chloride; phenol, butyl or benzyl alcohol; alkyl parabens such as methyl or propyl paraben; catechol; resorcinol; cyclohexanol; 3-pentanol; or m-cresol); low molecular weight (less than about 10 residues) polypeptides; proteins, such as serum albumin, gelatin, or immunoglobulins; hydrophilic polymers such as polyvinylpyrrolidone; amino acids such as glycine, glutamine, asparagine, histidine, arginine, or lysine; monosaccharides, disaccharides, or other carbohydrates including glucose, mannose, or dextrins; chelating agents such as EDTA; sugars such as sucrose, mannitol, trehalose or sorbitol; salt-forming counter-ions such as sodium; metal complexes (e.g., Zn-protein complexes); and/or non-ionic surfactants such as TWEEN™ PLURONICS™ or polyethylene glycol (PEG).

[0260] In one embodiment, the present disclosure provides a pharmaceutical composition comprising a fusion protein described herein for use as a medicament. In another embodiment, the disclosure provides a pharmaceutical composition for use in a method for the treatment of cancer. In some embodiments, pharmaceutical compositions comprise a fusion protein disclosed herein, and optionally one or more additional prophylactic or therapeutic agents, in a pharmaceutically acceptable carrier.

[0261] A pharmaceutical composition may be formulated for any route of administration to a subject. Specific examples of routes of administration include parenteral administration (e.g., intravenous, subcutaneous, intramuscular). In some embodiments, the pharmaceutical composition is formulated for intravenous administration. In some embodiments, the pharmaceutical composition is formulated for subcutaneous administration. Injectables can be prepared in conventional forms, either as liquid solutions or suspensions. The injectables can contain one or more excipients. Exemplary excipients include, for example, water, saline, dextrose, glycerol or ethanol. In addition, if desired, the pharmaceutical compositions to be administered can also contain minor amounts of non-toxic auxiliary substances such as wetting or emulsifying agents, pH buffering agents, stabilizers, solubility enhancers, or other such agents, such as for example, sodium acetate, sorbitan monolaurate, triethanolamine oleate or cyclodextrins.

[0262] In some embodiments, the pharmaceutical composition is formulated for intravenous administration. Suitable carriers for intravenous administration include physiological saline or phosphate buffered saline (PBS), or solutions containing thickening or solubilizing agents, such as glucose, polyethylene glycol, or polypropylene glycol or mixtures thereof.

[0263] The compositions to be used for in vivo administration can be sterile. This is readily accomplished by filtration through, e.g., sterile filtration membranes.

[0264] Pharmaceutically acceptable carriers used in the parenteral preparations described herein include for example, aqueous vehicles, nonaqueous vehicles, antimicrobial agents, isotonic agents, buffers, antioxidants, local anesthetics, suspending and dispersing agents, emulsifying agents, sequestering or chelating agents or other pharmaceutically acceptable substances. Examples of aqueous vehicles, which can be incorporated in one or more of the formulations described herein, include sodium chloride injection, Ringer's injection, isotonic dextrose injection, sterile water injection, dextrose or lactated Ringer's injection. Nonaqueous parenteral vehicles, which can be incorporated in one or more of the formulations described herein, include fixed oils of vegetable origin, cottonseed oil, corn oil, sesame oil or peanut oil. Antimicrobial agents in bacteriostatic or fungistatic concentrations can be added to the parenteral preparations described herein and packaged in multiple-dose containers, which include phenols or cresols, mercurials, benzyl alcohol, chlorobutanol, methyl and propyl p-hydroxybenzoic acid esters, thimerosal, benzalkonium chloride or benzethonium chloride. Isotonic agents, which can be incorporated in one or more of the formulations described herein, include sodium chloride or dextrose. Buffers, which can be incorporated in one or more of the formulations described herein, include phosphate or citrate. Antioxidants, which can be incorporated in one or more of the formulations described herein, include sodium bisulfate. Local anesthetics, which can be incorporated in one or more of the formulations described herein, include procaine hydrochloride. Suspending and dispersing agents, which can be incorporated in one or more of the formulations described herein, include sodium carboxymethylcelluose, hydroxypropyl methylcellulose or polyvinylpyrrolidone. Emulsifying agents, which can be incorporated in one or more of the formulations described herein, include Polysorbate 80 (TWEEN® 80). A sequestering or chelating agent of metal ions, which can be incorporated in one or more of the formulations described herein, is EDTA. Pharmaceutical carriers, which can be incorporated in one or more of the formulations described herein, also include ethyl alcohol, polyethylene glycol or propylene glycol for water miscible vehicles; or sodium hydroxide, hydrochloric acid, citric acid or lactic acid for pH adjustment.

[0265] The precise dose to be employed in a pharmaceutical composition will also depend on the route of administration, and the seriousness of the condition caused by it, and should be decided according to the judgment of the practitioner and each subject's circumstances. For example, effective doses may also vary depending upon means of administration, target site, physiological state of the subject (including age, body weight, and health), other medications administered, or whether therapy is prophylactic or therapeutic. Therapeutic dosages are preferably titrated to optimize safety and efficacy.

### 5.6 Methods of Therapeutic Use

[0266] In one aspect, provided herein are methods of treating a disease in a subject by administering to the subject having the disease a fusion protein described herein, a nucleic acid encoding a fusion protein described herein, a vector comprising a nucleic acid encoding a fusion protein described herein, or a viral particle comprising a nucleic acid encoding a fusion protein described herein.

[0267] The fusion protein can be delivered to host cells via any method known in the art. For example, a viral delivery system (e.g., a retrovirus, an adenovirus, an adeno associated virus, a herpes virus, a lentivirus, a pox virus, a vaccinia virus, a vesicular stomatitis virus, a polio virus, a Newcastle's Disease virus, an Epstein-Barr virus, an influenza virus, a reoviruses, a myxoma virus, a maraba virus, a rhabdovirus, an enadenotucirev or a coxsackie) can be utilized to deliver a nucleic acid (e.g., DNA or RNA molecule) encoding the fusion protein for expression within a population of cells of a subject. In some embodiments, the nucleic acid encoding the fusion protein is present episomally within the population of cells of the subject. In some embodiments, the nucleic acid encoding the fusion protein is incorporated into the genome of the population of cells of the subject. In some embodiments, the virus is replication competent. In some embodiments, the virus is replication deficient.

[0268] In some embodiments, the fusion protein is administered to the subject. In some embodiments, a nucleic acid (DNA or RNA) is administered to the subject. In some embodiments, the nucleic acid (DNA or RNA) is complexed within a carrier (e.g., a nanoparticle, a liposome, a microsphere). In some embodiments, a nucleic acid (DNA or RNA) within a non-viral vector (e.g., a plasmid) encoding the fusion protein is administered to the subject.

### 5.6.1 Administration

[0269] The fusion protein can be delivered to host cells via any method known in the art. For example, a viral delivery system (e.g., a retrovirus, an adenovirus, an adeno associated virus, a herpes virus, a lentivirus, a pox virus, a vaccinia virus, a vesicular stomatitis virus, a polio virus, a Newcastle's Disease virus, an Epstein-Barr virus, an influenza virus, a reoviruses, a myxoma virus, a maraba virus, a rhabdovirus, an enadenotucirev or a coxsackie) can be utilized to deliver a nucleic acid (e.g., DNA or RNA molecule) encoding the fusion protein for expression within a population of cells of a subject. In some embodiments, the nucleic acid encoding the fusion protein is present episomally within the population of cells of the subject. In some embodiments, the nucleic acid encoding the fusion protein is incorporated into the genome of the population of cells of the subject. In some embodiments, the virus is replication competent. In some embodiments, the virus is replication deficient.

[0270] In some embodiments, the fusion protein is administered to the subject. In some embodiments, a nucleic acid (DNA or RNA) is administered to the subject. In some embodiments, the nucleic acid (DNA or RNA) is complexed within a carrier (e.g., a nanoparticle, a liposome, a microsphere). In some embodiments, a nucleic acid (DNA or RNA) within a non-viral vector (e.g., a plasmid) encoding the fusion protein is administered to the subject.

[0271] In some embodiment, the fusion protein is administered parenterally. In some embodiments, the fusion protein is administered via intravenous, intramuscular, intraarterial, intrathecal, intralymphatic, intralesional, intracapsular, intraorbital, intracardiac, intradermal, intraperitoneal, transtracheal, subcutaneous, subcuticular, intraarticular, subcapsular, subarachnoid, intraspinal, epidural or intrasternal injection or infusion. In some embodiments, the fusion protein is intravenously administered. In some embodiments, the fusion protein is subcutaneously administered. In some embodiments, the fusion protein is administered via a non-parenteral route, or orally. Other non-parenteral routes include a topical, epidermal or mucosal route of administration, for example, intranasally, vaginally, rectally, sublingually or topically. Administering can also be performed, for example, once, a plurality of times, and/or over one or more extended periods.

[0272] In some embodiments, the methods disclosed herein are used in place of standard of care therapies. In certain embodiments, a standard of care therapy is used in combination with any method disclosed herein. In some embodiments, the methods disclosed herein are used after standard of care therapy has failed. In some embodiments, the fusion protein is co-administered, administered prior to, or administered after, an additional therapeutic agent. In some embodiments, the disease is a genetic disease.

### 5.6.2 Exemplary Genetic Diseases

[0273] In some embodiments, the disease is a genetic disease. In some embodiments, the genetic disease is associated with decreased expression of a functional target membrane protein. In some embodiments, the genetic disease is associated with decreased stability of a functional target membrane protein. In some embodiments, the genetic disease is associated with increased ubiquitination of a target membrane protein. In some embodiments, the genetic disease is associated with increased ubiquitination and degradation of a target membrane protein. In some embodiments, the genetic disease is a haploinsufficiency disease.

[0274] In some embodiments, the disease is an epileptic encephalopathy. In some embodiments, the epileptic encephalopathy is an early infantile epileptic encephalopathy. In some embodiments, the early infantile epileptic encephalopathy is selected from the group consisting of early infantile epileptic encephalopathy type 9, early infantile epileptic encephalopathy type 11, early infantile epileptic encephalopathy type 13, and early infantile epileptic encephalopathy type 27. In some embodiments, the disease is an episodic ataxia. In some embodiments, the disease is episodic ataxia type 2. In some embodiments, the disease is an episodic kinesigenic dyskinesia. In some embodiments, the disease is episodic kinesigenic dyskinesia type 1. In some embodiments, the disease is epilepsy. In some embodiments, the epilepsy is focal, with speech disorder and with or without mental retardation; myoclonic-atonic epilepsy; epilepsy type 7; or GABRB3 associated epilepsy. In some embodiments, the disease is tuberous sclerosis. In some embodiments, the disease is tuberous sclerosis type 1 or tuberous sclerosis type 2. In some embodiments, the disease is KCNQ2 encephalopathy.

[0275] In some embodiments, the disease is selected from the group consisting of early a GRIN2B-Related Disorder, a SCN2A-Related Disorder, a SCN8A-Related Disorder, SLC6A1-Related Disorder, a PRRT2 Dyskinesia & Epilepsy, a GRIN2A-Related Disorder, a CACNA1A-Related Disorder, a SCN9A Epilepsy, a PCDH19 Encephalopathy, KCNQ2 encephalopathy, infantile epileptic encephalopathy type 9, early infantile epileptic encephalopathy type 11, early infantile epileptic encephalopathy type 13, early infantile epileptic encephalopathy type 27, cystic fibrosis, Dravet syndrome, Wilson disease, episodic ataxia type 2; GLUT1 deficiency syndrome, episodic kinesigenic dyskinesia 1, epilepsy (e.g., focal, with speech disorder and with or without mental retardation), myoclonic-atonic epilepsy, Usher syndrome type 2A, alternating hemiplegia of childhood, alternating hemiplegia of childhood type 2, epilepsy type 7, GABRB3 associated epilepsy; tuberous sclerosis type 2; tuberous sclerosis type 1, KCNQ2-Related Disorders (Epileptic Encephalopathy), Becker Muscular Dystrophy, Autosomal Dominant RP, Alagille syndrome 1, Gillespie Syndrome, and Ovarian dysgenesis 1 (ODG1).

[0276] In some embodiments, the target membrane protein is GRIN2B, and the disease is a GRIN2B related disorder (e.g., an epileptic encephalopathy). In some embodiments, the target membrane protein is GRIN2B, and the disease is an early infantile epileptic encephalopathy. In some embodiments, the target membrane protein is GRIN2B, and the disease is early infantile epileptic encephalopathy type 27. In some embodiments, the target membrane protein is CFTR, and the disease is cystic fibrosis. In some embodiments, the target membrane protein is SCN1A, and the disease is Dravet syndrome. In some embodiments, the target membrane protein is ATP7B, and the disease is Wilson disease. In some embodiments, the target membrane protein is CACNA1A, and the disease is a CACA1A related disorder. In some embodiments, the target membrane protein is CACNA1A, and the disease is episodic ataxia type 2. In some embodiments, the target membrane protein is KCNQ2, and the disease is an KCNQ2 encephalopathy. In some embodiments, the target membrane protein is KCNQ2, and the disease is an epileptic encephalopathy. In some embodiments, the target membrane protein is SCN2A, and the disease is a SCN2A related disorder (e.g., an epileptic encephalopathy). In some embodiments, the target membrane protein is SCN2A, and the disease is early infantile epileptic encephalopathy type 11. In some embodiments, the target membrane protein is SLC2A1, and the disease is GLUT1 deficiency syndrome. In some embodiments, the target membrane protein is SCN8A, and the disease is a SCN8A related disorder (e.g., an epileptic encephalopathy). In some embodiments, the target membrane protein is SCN8A, and the disease is an epileptic encephalopathy. In some embodiments, the target membrane protein is SCN8A, and the disease is early infantile epileptic encephalopathy type 13. In some embodiments, the target membrane protein is PRRT2, and the disease is a PRRPT2 dyskinesia and/or epilepsy. In some embodiments, the target membrane protein is PRRT2, and the disease is an episodic kinesigenic dyskinesia type. In some embodiments, the target membrane protein is PRRT2, and the disease is episodic kinesigenic dyskinesia type 1. In some embodiments, the target membrane protein is GRIN2A, and the disease is a GRIN2A related disorder. In some embodiments, the target membrane protein is GRIN2A, and the disease is epilepsy. In some embodiments, the target membrane protein is GRIN2A, and the disease is focal epilepsy. In some embodiments, the target membrane protein is GRIN2A, and the disease is focal epilepsy with speech disorder and with or without mental retardation. In some embodiments, the target membrane protein is SLC6A1, and the disease is a SLC6A1 related disorder. In some embodiments, the target membrane protein is SLC6A1, and the disease is epilepsy. In some embodiments, the target membrane protein is SLC6A1, and the disease is myoclonic-atonic epilepsy. In some embodiments, the target membrane protein is USH2A, and the disease is Usher syndrome. In some embodiments, the target membrane protein is USH2A, and the disease is Usher syndrome type 2A. In some embodiments, the target membrane protein is ATP1A2, and the disease is alternating hemiplegia of childhood. In some embodiments, the target membrane protein is ATP1A2, and the disease is alternating hemiplegia of childhood type 1. In some embodiments, the target membrane protein is ATP1A3, and the disease is alternating hemiplegia of childhood. In some embodiments, the target membrane protein is ATP1A3, and the disease is alternating hemiplegia of childhood type 2. In some embodiments, the target membrane protein is SCN9A, and the disease an SCN9A epilepsy. In some embodiments, the target membrane protein is SCN9A1, and the disease an SCN9A epilepsy. In some embodiments, the target membrane protein is SCN9A1, and the disease is epilepsy. In some embodiments, the target membrane protein is SCN9A1, and the disease is epilepsy type 7. In some embodiments, the target membrane protein is PCDH19, and the disease is PCDH19 encephalopathy. In some embodiments, the target membrane protein is PCDH19, and the disease is an early infantile epileptic encephalopathy. In some embodiments, the target membrane protein is PCDH19, and the disease is early infantile epileptic encephalopathy type 9. In some embodiments, the target membrane protein is GABRB3, and the disease is epilepsy. In some embodiments, the target membrane protein is GABRB3, and the disease is GABRB3 associated epilepsy. In some embodiments, the target membrane protein is TSC2, and the disease is tuberous sclerosis. In some embodiments, the target membrane protein is TSC2, and the disease is tuberous sclerosis type 2. In some embodiments, the target membrane protein is TSC2, and the disease is tuberous sclerosis type 1. In some embodiments, the target membrane protein is TSC1, and the disease is tuberous sclerosis. In some embodiments, the target membrane protein is TSC1, and the disease is tuberous sclerosis type 1. In some embodiments, the target membrane protein is TSC1, and the disease is tuberous sclerosis type 2. In some embodiments, the target membrane protein is KCNQ3, and the disease is KCNQ2-Related Disorders (Epileptic Encephalopathy). In some embodiments, the target membrane protein is DMD, and the disease is Becker Muscular Dystrophy. In some embodiments, the target membrane protein is RHO, and the disease is Autosomal Dominant RP. In some embodiments, the target membrane protein is JAG1, and the disease is Alagille syndrome 1. In some embodiments, the target membrane protein is ITPR1, and the disease is Gillespie Syndrome. In some embodiments, the target membrane protein is FSHR, and the disease is ovarian dysgenesis 1 (ODG1).

### 5.7 Kits

[0277] In one aspect, provided herein are kits comprising a fusion protein described herein, a nucleic acid encoding a fusion protein described herein, a vector comprising a nucleic acid encoding a fusion protein described herein, or a viral particle comprising a nucleic acid encoding a fusion protein described herein, for therapeutic uses. Kits typically include a label indicating the intended use of the contents of the kit and instructions for use. The term label includes any writing, or recorded material supplied on or with the kit, or which otherwise accompanies the kit. Accordingly, this disclosure provides a kit for treating a subject afflicted with a disease (e.g., a genetic disease), the kit comprising: (a) a dosage of a fusion protein, a nucleic acid encoding a fusion protein described herein, a vector comprising a nucleic acid encoding a fusion protein described herein, or a viral particle comprising a nucleic acid encoding a fusion described herein; and (b) instructions for using the fusion protein in any of the therapy methods disclosed herein.

### 6. EXAMPLES

[0278] The present invention is further illustrated by the following examples which should not be construed as further limiting.

### 6.1 Example 1. Generation of Targeted Engineered Deubiquitinases

[0279] This example provides general experimental methods of using fluorescent tagged target proteins together with fluorophore tagged engineered deubiquitinases (enDUBs) to demonstrate up-regulation of expression in the context of an enDUB. For illustrative purposes the constructs disclosed below will be synthesized in a suitable vector for mammalian expression. Generally, the target protein will be expressed with a C-terminal YFP followed by a P2A cleavage signal and an mCherry protein as a second reporter (Target protein-YFP-P2A-mCherry). This construct will be co-transfected in the presence of a trifunctional fusion protein comprising of a CFP protein followed by a P2A signal and a nanobody specifically binding to YPF followed by the engineered DUB (CFP-P2A-Anti-YFPnanobody-enDUB). In applications for drug treatment the targeting nanobodies (or other specific binders) will be directed to the wild type (or disease-causing mutant) protein in the cell to be upregulated while the enDUB is fused to a binding protein directed to the target protein. Target protein binding moieties could be any antibody or antibody fragments, nanobodies, or any other non-antibody scaffold such as fibronectins, anticalins, ankyrin repeats or natural binding proteins interacting specifically with the target protein to be upregulated. The amino acid sequence of the components of the test fusion proteins is provided in Table 4 below.

TABLE 4
Amino Acid Sequence of Components of test fusion proteins

| Description | SEQ | |
|---|---|---|
| Target Proteins | ID NO | Amino Acid Sequence |
| Beta 2 | 246 | MGQPGNGSAFLLAPNGSHAPDHDVTQERDEVWVVGMGIVMSLIVLA |
| adrenergic | | IVFGNVLVITAIAKFERLQTVTNYFITSLACADLVMGLAVVPFGAA |
| receptor human | | HILMKMWTFGNFWCEFWTSIDVLCVTASIETLCVIAVDRYFAITSP |
| | | FKYQSLLTKNKARVIILMVWIVSGLTSFLPIQMHWYRATHQEAINC |
| | | YANETCCDFFTNQAYAIASSIVSFYVPLVIMVFVYSRVFQEAKRQL |
| | | QKIDKSEGRFHVQNLSQVEQDGRTGHGLRRSSKFCLKEHKALKTLG |
| | | IIMGTFTLCWLPFFIVNIVHVIQDNLIRKEVYILLNWIGYVNSGEN |
| | | PLIYCRSPDFRIAFQELLCLRRSSLKAYGNGYSSNGNTGEQSGYHV |
| | | EQEKENKLLCEDLPGTEDFVGHQGTVPSDNIDSQGRNCSTNDSLL |
| Kappa-type | 247 | MDSPIQIFRGEPGPTCAPSACLPPNSSAWFPGWAEPDSNGSAGSED |
| opioid receptor | | AQLEPAHISPAIPVIITAVYSVVFVVGLVGNSLVMFVIIRYTKMKT |
| human | | ATNIYIFNLALADALVTTTMPFQSTVYLMNSWPFGDVLCKIVISID |
| | | YYNMFTSIFTLTMMSVDRYIAVCHPVKALDERTPLKAKIINICIWL |
| | | LSSSVGISAIVLGGTKVREDVDVIECSLQFPDDDYSWWDLEMKICV |
| | | FIFAFVIPVLIIIVCYTLMILRLKSVRLLSGSREKDRNLRRITRLV |
| | | LVVVAVFVVCWTPIHIFILVEALGSTSHSTAALSSYYFCIALGYTN |
| | | SSLNPILYAFLDENFKRCFRDFCFPLKMRMERQSTSRVRNTVQDPA |
| | | YLRDIDGMNKPV |
| Muscarinic | 248 | MNNSTNSSNNSLALTSPYKTFEVVFIVLVAGSLSLVTIIGNILVMV |
| acetylcholine | | SIKVNRHLQTVNNYFLESLACADLIIGVESMNLYTLYTVIGYWPLG |
| receptor M2 | | PVVCDLWLALDYVVSNASVMNLLIISEDRYFCVTKPLTYPVKRTTK |
| human | | MAGMMIAAAWVLSFILWAPAILFWQFIVGVRTVEDGECYIQFFSNA |
| | | AVTFGTAIAAFYLPVIIMTVLYWHISRASKSRIKKDKKEPVANQDP |
| | | VSPSLVQGRIVKPNNNNMPSSDDGLEHNKIQNGKAPRDPVTENCVQ |
| | | GEEKESSNDSTSVSAVASNMRDDEITQDENTVSTSLGHSKDENSKQ |
| | | TCIRIGTKTPKSDSCTPTNTTVEVVGSSGQNGDEKQNIVARKIVKM |
| | | TKQPAKKKPPPSREKKVTRTILAILLAFIITWAPYNVMVLINTFCA |
| | | PCIPNTVWTIGYWLCYINSTINPACYALCNATFKKTFKHLLMCHYK |
| | | NIGATR |

Fluorescent Proteins

| | | |
|---|---|---|
| YFP | 249 | VSKGEELFTGVVPILVELDGDVNGHKFSVSGEGEGDATYGKLTLKF |
| | | ICTTGKLPVPWPTLVTTFGYGLQCFARYPDHMKQHDFFKSAMPEGY |
| | | VQERTIFFKDDGNYKTRAEVKFEGDTLVNRIELKGIDFKEDGNILG |
| | | HKLEYNYNSHNVYIMADKQKNGIKVNFKIRHNIEDGSVQLADHYQQ |
| | | NTPIGDGPVLLPDNHYLSYQSALSKDPNEKRDHMVLLEFVTAAGIT |
| | | LGMDELYK |
| mCherry | 250 | MVSKGEEDNMAIIKEFMRFKVHMEGSVNGHEFEIEGEGEGRPYEGT |
| | | QTAKLKVTKGGPLPFAWDILSPQFMYGSKAYVKHPADIPDYLKLSF |
| | | PEGFKWERVMNFEDGGVVTVTQDSSLQDGEFIYKVKLRGTNFPSDG |
| | | PVMQKKTMGWEASSERMYPEDGALKGEIKQRLKLKDGGHYDAEVKT |
| | | TYKAKKPVQLPGAYNVNIKLDITSHNEDYTIVEQYERAEGRHSTGG |
| | | MDELYK |
| CFP | 251 | MVSKGEELFTGVVPILVELDGDVNGHKESVSGEGEGDATYGKLTLK |
| | | FICTTGKLPVPWPTLVTTLTWGVQCFSRYPDHMKQHDFFKSAMPEG |
| | | YVQERTIFFKDDGNYKTRAEVKFEGDTLVNRIELKGIDFKEDGNIL |
| | | GHKLEYNYISHNVYITADKQKNGIKANFKIRHNIEDGSVQLADHYQ |
| | | QNTPIGDGPVLLPDNHYLSTQSALSKDPNEKRDHMVLLEFVTAAGI |
| | | TLGMDELYK |

A2 Peptides

| | | |
|---|---|---|
| P2A | 252 | GSGATNFSLLKQAGDVEENPGP |
| T2A | 253 | GSGEGRGSLLTCGDVEENPGP |
| E2A | 254 | GSGQCTNYALLKLAGDVESNPGP |

Target Binders

| | | |
|---|---|---|
| YFP targeting | 255 | WVAGMSSAGDRSSYEDSVKGRFTISRDDARNTVYLQMNSLKPEDTA |
| nanobody | | QVQLVESGGALVQPGGSLRLSCAASGFPVNRYSMRWYRQAPGKERE |
| | | VYYCNVNVGFEYWGQGTQVTVSS |
| Beta 2 | 256 | QVQLQESGGGLVQAGGSLRLSCAASGSIFALNIMGWYRQAPGKQRE |
| adrenergic | | LVAAIHSGGTTNYANSVKGRFTISRDNAANTVYLQMNSLKPEDTAV |
| receptor human | | YYCNVKDFGAIIYDYDYWGQGTQVTVSS |
| binder | | |
| (monobody) | | |
| Kappa-type | 257 | MAQVQLVESGGGLVRPGGSLRLSCVDSERTSYPMGWERRAPGKERE |
| opioid receptor | | FVASITWSGIDPTYADSVADRETTSRDVANNTLYLQMNSLKHEDTA |
| human binder | | VYYCAARAPVGQSSSPYDYDYWGQGTQVTVSSHHHHHHEPEA |
| (monobody) | | |
| Muscarinic | 258 | GPGSQVQLQESGGGLVQAGDSLRLSCAASGFDEDNFDDYAIGWFRQ |
| acetylcholine | | APGQEREGVSCIDPSDGSTIYADSAKGRFTISSDNAENTVYLQMNS |
| receptor M2 | | LKPEDTAVYVCSAWTLFHSDEYWGQGTQVTVSS |
| human | | |
| (monobody) | | |

EnDUBS

| | | |
|---|---|---|
| Cezanne | 259 | PPSFSEGSGGSRTPEKGFSDREPTRPPRPILQRQDDIVQEKRLSRG |
| | | ISHASSSIVSLARSHVSSNGGGGGSNEHPLEMPICAFQLPDLTVYN |
| | | EDERSFIERDLIEQSMLVALEQAGRLNWWVSVDPTSQRLLPLATTG |
| | | DGNCLLHAASLGMWGFHDRDLMLRKALYALMEKGVEKEALKRRWRW |
| | | QQTQQNKESGLVYTEDEWQKEWNELIKLASSEPRMHLGTNGANCGG |
| | | VESSEEPVYESLEEFHVFVLAHVLRRPIVVVADTMLRDSGGEAFAP |
| | | IPFGGIYLPLEVPASQCHRSPLVLAYDQAHFSALVSMEQKENTKEQ |
| | | AVIPLTDSEYKLLPLHFAVDPGKGWEWGKDDSDNVRLASVILSLEV |
| | | KLHLLHSYMNVKWIPLSSDAQAPLAQ |
| OTUD1 | 260 | DEKLALYLAEVEKQDKYLRQRNKYRFHIIPDGNCLYRAVSKTVYGD |
| | | QSLHRELREQTVHYIADHLDHFSPLIEGDVGEFIIAAAQDGAWAGY |
| | | PELLAMGQMLNVNIHLTTGGRLESPTVSTMIHYLGPEDSLRPSIWL |
| | | SWLSNGHYDAVEDHSYPNPEYDNWCKQTQVQRKRDEELAKSMAISL |
| | | SKMYIEQNACS |
| TRABID | 261 | LEVDFKKLKQIKNRMKKTDWLFLNACVGVVEGDLAAIEAYKSSGGD |
| | | IARQLTADEVRLLNRPSAFDVGYTLVHLAIRFQRQDMLAILLTEVS |
| | | QQAAKCIPAMVCPELTEQIRREIAASLHQRKGDFACYFLTDLVTFT |
| | | LPADIEDLPPTVQEKLFDEVLDRDVQKELEEESPIINWSLELATRL |
| | | DSRLYALWNRTAGDCLLDSVLQATWGIYDKDSVLRKALHDSLHDCS |
| | | HWFYTRWKDWESWYSQSFGLHESLREEQWQEDWAFILSLASQPGAS |
| | | LEQTHIFVLAHILRRPIIVYGVKYYKSFRGETLGYTRFQGVYLPLL |
| | | WEQSFCWKSPIALGYTRGHFSALVAMENDGYGNRGAGANLNTDDDV |
| | | TITFLPLVDSERKLLHVHELSAQELGNEEQQEKLLREWLDCCVTEG |
| | | GVLVAMQKSSRRRNHPLVTQMVEKWLDRYRQIRPCTSLS |
| USP21 | 262 | SDDKMAHHTLLLGSGHVGLRNLGNTCELNAVLQCLSSTRPLRDFCL |
| | | RRDFRQEVPGGGRAQELTEAFADVIGALWHPDSCEAVNPTRFRAVE |
| | | QKYVPSFSGYSQQDAQEFLKLLMERLHLEINRRGRRAPPILANGPV |
| | | PSPPRRGGALLEEPELSDDDRANLMWKRYLEREDSKIVDLFVGQLK |
| | | SCLKCQACGYRSTTFEVFCDLSLPIPKKGFAGGKVSLRDCFNLFTK |
| | | EEELESENAPVCDRCRQKTRSTKKLTVQRFPRILVLHLNRESASRG |
| | | SIKKSSVGVDFPLQRLSLGDFASDKAGSPVYQLYALCNHSGSVHYG |
| | | HYTALCRCQTGWHVYNDSRVSPVSENQVASSEGYVLFYQLMQEPPR |
| | | CL |
| OTUD4 | 263 | ATPMDAYLRKLGLYRKLVAKDGSCLFRAVAEQVLHSQSRHVEVRMA |
| | | CIHYLRENREKFEAFIEGSFEEYLKRLENPQEWVGQVEISALSLMY |
| | | RKDFIIYREPNVSPSQVTENNFPEKVLLCFSNGNHYDIVYPIKYKE |
| | | SSAMCQSLLYELLYEKVEKTDVSKIVMELDTLEVADE |
| Human USP3 | 264 | MECPHLSSSVCIAPDSAKFPNGSPSSWCCSVCRSNKSPWVCLTCSS |
| (full length) | | VHCGRYVNGHAKKHYEDAQVPLTNHKKSEKQDKVQHTVCMDCSSYS |
| nuclear located | | TYCYRCDDFVVNDTKLGLVQKVREHLQNLENSAFTADRHKKRKLLE |
| | | NSTLNSKLLKVNGSTTAICATGLRNLGNTCEMNAILQSLSNIEQFC |
| | | CYFKELPAVELRNGKTAGRRTYHTRSQGDNNVSLVEEFRKTLCALW |
| | | QGSQTAFSPESLFYVVWKIMPNERGYQQQDAHEFMRYLLDHLHLEL |
| | | QGGFNGVSRSAILQENSTLSASNKCCINGASTVVTAIFGGILQNEV |
| | | NCLICGTESRKFDPELDLSLDIPSQFRSKRSKNQENGPVCSLRDCL |
| | | RSFTDLEELDETELYMCHKCKKKQKSTKKFWIQKLPKVLCLHLKRF |
| | | HWTAYLRNKVDTYVEFPLRGLDMKCYLLEPENSGPESCLYDLAAVV |
| | | VHHGSGVGSGHYTAYATHEGRWFHENDSTVTLTDEETVVKAKAYIL |
| | | FYVEHQAKAGSDKL |

[0280] The amino acid sequence of the test fusion proteins is provided in Table 5 below.

TABLE 5
Amino acid sequence of exemplary test fusion proteins

| Description | SEQ ID NO | Amino Acid Sequence |
|---|---|---|
| Beta 2 | 265 | MGQPGNGSAFLLAPNGSHAPDHDVTQERDEVWVVGMGIVMSLIVLA |
| adrenergic | | IVFGNVLVITAIAKFERLQTVTNYFITSLACADLVMGLAVVPFGAA |
| receptor human | | HILMKMWTFGNFWCEFWTSIDVLCVTASIETLCVIAVDRYFAITSP |
| Target-YFP- | | FKYQSLLTKNKARVIILMVWIVSGLTSELPIQMHWYRATHQEAINC |
| P2A-mCherrry | | YANETCCDFFTNQAYAIASSIVSFYVPLVIMVFVYSRVFQEAKRQL |
| | | QKIDKSEGRFHVQNLSQVEQDGRTGHGLRRSSKFCLKEHKALKTLG |
| | | IIMGTFTLCWLPFFIVNIVHVIQDNLIRKEVYILLNWIGYVNSGEN |
| | | PLIYCRSPDFRIAFQELLCLRRSSLKAYGNGYSSNGNTGEQSGYHV |
| | | EQEKENKLLCEDLPGTEDFVGHQGTVPSDNIDSQGRNCSTNDSLLV |
| | | SKGEELFTGVVPILVELDGDVNGHKESVSGEGEGDATYGKLTLKFI |
| | | CTTGKLPVPWPTLVTTFGYGLQCFARYPDHMKQHDFFKSAMPEGYV |
| | | QERTIFFKDDGNYKTRAEVKFEGDTLVNRIELKGIDFKEDGNILGH |
| | | KLEYNYNSHNVYIMADKQKNGIKVNFKIRHNIEDGSVQLADHYQQN |
| | | TPIGDGPVLLPDNHYLSYQSALSKDPNEKRDHMVLLEFVTAAGITL |
| | | GMDELYKGSGATNFSLLKQAGDVEENPGPMVSKGEEDNMAIIKEFM |
| | | RFKVHMEGSVNGHEFEIEGEGEGRPYEGTQTAKLKVTKGGPLPFAW |
| | | DILSPQFMYGSKAYVKHPADIPDYLKLSFPEGEKWERVMNFEDGGV |
| | | VTVTQDSSLQDGEFIYKVKLRGTNFPSDGPVMQKKTMGWEASSERM |
| | | YPEDGALKGEIKQRLKLKDGGHYDAEVKTTYKAKKPVQLPGAYNVN |
| | | IKLDITSHNEDYTIVEQYERAEGRHSTGGMDELYK |
| Human kappa- | 266 | MDSPIQIFRGEPGPTCAPSACLPPNSSAWFPGWAEPDSNGSAGSED |
| type opioid- | | AQLEPAHISPAIPVIITAVYSVVFVVGLVGNSLVMFVIIRYTKMKT |
| receptor Target | | ATNIYIFNLALADALVTTTMPFQSTVYLMNSWPFGDVLCKIVISID |
| YFP-P2A- | | YYNMFTSIFTLTMMSVDRYIAVCHPVKALDERTPLKAKIINICIWL |
| mCherrry | | LSSSVGISAIVLGGTKVREDVDVIECSLQFPDDDYSWWDLEMKICV |
| | | FIFAFVIPVLIIIVCYTLMILRLKSVRLLSGSREKDRNLRRITRLV |
| | | LVVVAVFVVCWTPIHIFILVEALGSTSHSTAALSSYYFCIALGYTN |
| | | SSLNPILYAFLDENFKRCFRDFCFPLKMRMERQSTSRVRNTVQDPA |
| | | YLRDIDGMNKPVVSKGEELFTGVVPILVELDGDVNGHKESVSGEGE |
| | | GDATYGKLTLKFICTTGKLPVPWPTLVTTFGYGLQCFARYPDHMKQ |
| | | HDFFKSAMPEGYVQERTIFFKDDGNYKTRAEVKFEGDTLVNRIELK |
| | | GIDFKEDGNILGHKLEYNYNSHNVYIMADKQKNGIKVNFKIRHNIE |
| | | DGSVQLADHYQQNTPIGDGPVLLPDNHYLSYQSALSKDPNEKRDHM |
| | | VLLEFVTAAGITLGMDELYKGSGATNFSLLKQAGDVEENPGPMVSK |
| | | GEEDNMAIIKEFMRFKVHMEGSVNGHEFEIEGEGEGRPYEGTQTAK |
| | | LKVTKGGPLPFAWDILSPQFMYGSKAYVKHPADIPDYLKLSFPEGE |
| | | KWERVMNFEDGGVVTVTQDSSLQDGEFIYKVKLRGTNFPSDGPVMQ |
| | | KKTMGWEASSERMYPEDGALKGEIKQRLKLKDGGHYDAEVKTTYKA |
| | | KKPVQLPGAYNVNIKLDITSHNEDYTIVEQYERAEGRHSTGGMDEL |
| | | YK |
| Muscarinic | 267 | MNNSTNSSNNSLALTSPYKTFEVVFIVLVAGSLSLVTIIGNILVMV |
| acetylcholine | | SIKVNRHLQTVNNYFLESLACADLIIGVESMNLYTLYTVIGYWPLG |
| receptor M2 | | PVVCDLWLALDYVVSNASVMNLLIISEDRYFCVTKPLTYPVKRTTK |
| Target-YFP- | | MAGMMIAAAWVLSFILWAPAILFWQFIVGVRTVEDGECYIQFFSNA |
| P2A-mCherrry | | AVTFGTAIAAFYLPVIIMTVLYWHISRASKSRIKKDKKEPVANQDP |
| | | VSPSLVQGRIVKPNNNNMPSSDDGLEHNKIQNGKAPRDPVTENCVQ |
| | | GEEKESSNDSTSVSAVASNMRDDEITQDENTVSTSLGHSKDENSKQ |
| | | TCIRIGTKTPKSDSCTPTNTTVEVVGSSGQNGDEKQNIVARKIVKM |
| | | TKQPAKKKPPPSREKKVTRTILAILLAFIITWAPYNVMVLINTFCA |
| | | PCIPNTVWTIGYWLCYINSTINPACYALCNATFKKTFKHLLMCHYK |
| | | NIGATRVSKGEELFTGVVPILVELDGDVNGHKESVSGEGEGDATYG |
| | | KLTLKFICTTGKLPVPWPTLVTTFGYGLQCFARYPDHMKQHDFFKS |
| | | AMPEGYVQERTIFFKDDGNYKTRAEVKFEGDTLVNRIELKGIDFKE |
| | | DGNILGHKLEYNYNSHNVYIMADKQKNGIKVNFKIRHNIEDGSVQL |
| | | ADHYQQNTPIGDGPVLLPDNHYLSYQSALSKDPNEKRDHMVLLEFV |
| | | TAAGITLGMDELYKGSGATNFSLLKQAGDVEENPGPMVSKGEEDNM |
| | | AIIKEFMRFKVHMEGSVNGHEFEIEGEGEGRPYEGTQTAKLKVTKG |
| | | GPLPFAWDILSPQFMYGSKAYVKHPADIPDYLKLSFPEGEKWERVM |
| | | NEEDGGVVTVTQDSSLQDGEFIYKVKLRGTNFPSDGPVMQKKTMGW |
| | | EASSERMYPEDGALKGEIKQRLKLKDGGHYDAEVKTTYKAKKPVQL |
| | | PGAYNVNIKLDITSHNEDYTIVEQYERAEGRHSTGGMDELYK |
| CFP-P2A- | 268 | MVSKGEELFTGVVPILVELDGDVNGHKFSVSGEGEGDATYGKLTLK |
| Cezanne enDUB | | FICTTGKLPVPWPTLVTTLTWGVQCFSRYPDHMKQHDEFKSAMPEG |
| | | YVQERTIFFKDDGNYKTRAEVKFEGDTLVNRIELKGIDFKEDGNIL |
| | | GHKLEYNYISHNVYITADKQKNGIKANFKIRHNIEDGSVQLADHYQ |
| | | QNTPIGDGPVLLPDNHYLSTQSALSKDPNEKRDHMVLLEFVTAAGI |
| | | TLGMDELYKGSGATNESLLKQAGDVEENPGPPPSFSEGSGGSRTPE |
| | | KGFSDREPTRPPRPILQRQDDIVQEKRLSRGISHASSSIVSLARSH |
| | | VSSNGGGGGSNEHPLEMPICAFQLPDLTVYNEDERSFIERDLIEQS |
| | | MLVALEQAGRLNWWVSVDPTSQRLLPLATTGDGNCLLHAASLGMWG |
| | | FHDRDLMLRKALYALMEKGVEKEALKRRWRWQQTQQNKESGLVYTE |
| | | DEWQKEWNELIKLASSEPRMHLGTNGANCGGVESSEEPVYESLEEF |
| | | HVFVLAHVLRRPIVVVADTMLRDSGGEAFAPIPEGGIYLPLEVPAS |
| | | QCHRSPLVLAYDQAHFSALVSMEQKENTKEQAVIPLTDSEYKLLPL |
| | | HFAVDPGKGWEWGKDDSDNVRLASVILSLEVKLHLLHSYMNVKWIP |
| | | LSSDAQAPLAQ |
| CFP-P2A- | 269 | MVSKGEELFTGVVPILVELDGDVNGHKFSVSGEGEGDATYGKLTLK |
| OTUD1 enDUB | | FICTTGKLPVPWPTLVTTLTWGVQCFSRYPDHMKQHDFFKSAMPEG |
| | | YVQERTIFFKDDGNYKTRAEVKFEGDTLVNRIELKGIDFKEDGNIL |
| | | GHKLEYNYISHNVYITADKQKNGIKANFKIRHNIEDGSVQLADHYQ |
| | | QNTPIGDGPVLLPDNHYLSTQSALSKDPNEKRDHMVLLEFVTAAGI |
| | | TLGMDELYKGSGATNESLLKQAGDVEENPGPDEKLALYLAEVEKQD |
| | | KYLRQRNKYRFHIIPDGNCLYRAVSKTVYGDQSLHRELREQTVHYI |
| | | ADHLDHFSPLIEGDVGEFIIAAAQDGAWAGYPELLAMGQMLNVNIH |
| | | LTTGGRLESPTVSTMIHYLGPEDSLRPSIWLSWLSNGHYDAVEDHS |
| | | YPNPEYDNWCKQTQVQRKRDEELAKSMAISLSKMYIEQNACS |
| CFP-P2A- | 270 | MVSKGEELFTGVVPILVELDGDVNGHKFSVSGEGEGDATYGKLTLK |
| TRABID | | FICTTGKLPVPWPTLVTTLTWGVQCFSRYPDHMKQHDFFKSAMPEG |
| enDUB | | YVQERTIFFKDDGNYKTRAEVKFEGDTLVNRIELKGIDFKEDGNIL |
| | | GHKLEYNYISHNVYITADKQKNGIKANFKIRHNIEDGSVQLADHYQ |
| | | QNTPIGDGPVLLPDNHYLSTQSALSKDPNEKRDHMVLLEFVTAAGI |
| | | TLGMDELYKGSGATNFSLLKQAGDVEENPGPLEVDEKKLKQIKNRM |
| | | KKTDWLFLNACVGVVEGDLAAIEAYKSSGGDIARQLTADEVRLLNR |
| | | PSAFDVGYTLVHLAIRFQRQDMLAILLTEVSQQAAKCIPAMVCPEL |
| | | TEQIRREIAASLHQRKGDFACYFLTDLVTFTLPADIEDLPPTVQEK |
| | | LFDEVLDRDVQKELEEESPIINWSLELATRLDSRLYALWNRTAGDC |
| | | LLDSVLQATWGIYDKDSVLRKALHDSLHDCSHWFYTRWKDWESWYS |
| | | QSFGLHESLREEQWQEDWAFILSLASQPGASLEQTHIFVLAHILRR |
| | | PIIVYGVKYYKSFRGETLGYTRFQGVYLPLLWEQSFCWKSPIALGY |
| | | TRGHFSALVAMENDGYGNRGAGANLNTDDDVTITFLPLVDSERKLL |
| | | HVHELSAQELGNEEQQEKLLREWLDCCVTEGGVLVAMQKSSRRRNH |
| | | PLVTQMVEKWLDRYRQIRPCTSLS |
| CFP-P2A- | 271 | MVSKGEELFTGVVPILVELDGDVNGHKFSVSGEGEGDATYGKLTLK |
| USP21 enDUB | | FICTTGKLPVPWPTLVTTLTWGVQCESRYPDHMKQHDFFKSAMPEG |
| | | YVQERTIFFKDDGNYKTRAEVKFEGDTLVNRIELKGIDFKEDGNIL |
| | | GHKLEYNYISHNVYITADKQKNGIKANFKIRHNIEDGSVQLADHYQ |
| | | QNTPIGDGPVLLPDNHYLSTQSALSKDPNEKRDHMVLLEFVTAAGI |
| | | TLGMDELYKGSGATNFSLLKQAGDVEENPGPSDDKMAHHTLLLGSG |
| | | HVGLRNLGNTCFLNAVLQCLSSTRPLRDFCLRRDFRQEVPGGGRAQ |
| | | ELTEAFADVIGALWHPDSCEAVNPTRFRAVFQKYVPSFSGYSQQDA |
| | | QEFLKLLMERLHLEINRRGRRAPPILANGPVPSPPRRGGALLEEPE |
| | | LSDDDRANLMWKRYLEREDSKIVDLFVGQLKSCLKCQACGYRSTTE |
| | | EVFCDLSLPIPKKGFAGGKVSLRDCFNLFTKEEELESENAPVCDRC |
| | | RQKTRSTKKLTVQRFPRILVLHLNRFSASRGSIKKSSVGVDFPLQR |
| | | LSLGDFASDKAGSPVYQLYALCNHSGSVHYGHYTALCRCQTGWHVY |
| | | NDSRVSPVSENQVASSEGYVLFYQLMQEPPRCL |
| CFP-P2A- | 272 | MVSKGEELFTGVVPILVELDGDVNGHKFSVSGEGEGDATYGKLTLK |
| OTUD4 enDUB | | FICTTGKLPVPWPTLVTTLTWGVQCFSRYPDHMKQHDFFKSAMPEG |
| | | YVQERTIFFKDDGNYKTRAEVKFEGDTLVNRIELKGIDFKEDGNIL |
| | | GHKLEYNYISHNVYITADKQKNGIKANFKIRHNIEDGSVQLADHYQ |
| | | QNTPIGDGPVLLPDNHYLSTQSALSKDPNEKRDHMVLLEFVTAAGI |
| | | TLGMDELYKGSGATNFSLLKQAGDVEENPGPATPMDAYLRKLGLYR |
| | | KLVAKDGSCLFRAVAEQVLHSQSRHVEVRMACIHYLRENREKFEAF |
| | | IEGSFEEYLKRLENPQEWVGQVEISALSLMYRKDFIIYREPNVSPS |
| | | QVTENNFPEKVLLCESNGNHYDIVYPIKYKESSAMCQSLLYELLYE |
| | | KVFKTDVSKIVMELDTLEVADE |
| CFP-P2A-a- | 273 | MVSKGEELFTGVVPILVELDGDVNGHKFSVSGEGEGDATYGKLTLK |
| YFPnanobody- | | FICTTGKLPVPWPTLVTTLTWGVQCFSRYPDHMKQHDFFKSAMPEG |
| Cezanne enDUB | | YVQERTIFFKDDGNYKTRAEVKFEGDTLVNRIELKGIDFKEDGNIL |
| | | GHKLEYNYISHNVYITADKQKNGIKANFKIRHNIEDGSVQLADHYQ |
| | | QNTPIGDGPVLLPDNHYLSTQSALSKDPNEKRDHMVLLEFVTAAGI |
| | | TLGMDELYKGSGATNFSLLKQAGDVEENPGPQVQLVESGGALVQPG |
| | | GSLRLSCAASGFPVNRYSMRWYRQAPGKEREWVAGMSSAGDRSSYE |
| | | DSVKGRFTISRDDARNTVYLQMNSLKPEDTAVYYCNVNVGFEYWGQ |
| | | GTQVTVSSPPSFSEGSGGSRTPEKGESDREPTRPPRPILQRQDDIV |
| | | QEKRLSRGISHASSSIVSLARSHVSSNGGGGGSNEHPLEMPICAFQ |
| | | LPDLTVYNEDERSFIERDLIEQSMLVALEQAGRLNWWVSVDPTSQR |
| | | LLPLATTGDGNCLLHAASLGMWGFHDRDLMLRKALYALMEKGVEKE |
| | | ALKRRWRWQQTQQNKESGLVYTEDEWQKEWNELIKLASSEPRMHLG |
| | | TNGANCGGVESSEEPVYESLEEFHVFVLAHVLRRPIVVVADTMLRD |
| | | SGGEAFAPIPEGGIYLPLEVPASQCHRSPLVLAYDQAHFSALVSME |
| | | QKENTKEQAVIPLTDSEYKLLPLHFAVDPGKGWEWGKDDSDNVRLA |
| | | SVILSLEVKLHLLHSYMNVKWIPLSSDAQAPLAQ |
| CFP-P2A-a- | 274 | MVSKGEELFTGVVPILVELDGDVNGHKFSVSGEGEGDATYGKLTLK |
| YFPnanobody- | | FICTTGKLPVPWPTLVTTLTWGVQCFSRYPDHMKQHDFFKSAMPEG |
| OTUD1 enDUB | | YVQERTIFFKDDGNYKTRAEVKFEGDTLVNRIELKGIDFKEDGNIL |
| | | GHKLEYNYISHNVYITADKQKNGIKANFKIRHNIEDGSVQLADHYQ |
| | | QNTPIGDGPVLLPDNHYLSTQSALSKDPNEKRDHMVLLEFVTAAGI |
| | | TLGMDELYKGSGATNFSLLKQAGDVEENPGPQVQLVESGGALVQPG |
| | | GSLRLSCAASGFPVNRYSMRWYRQAPGKEREWVAGMSSAGDRSSYE |
| | | DSVKGRFTISRDDARNTVYLQMNSLKPEDTAVYYCNVNVGFEYWGQ |
| | | GTQVTVSSDEKLALYLAEVEKQDKYLRQRNKYRFHIIPDGNCLYRA |
| | | VSKTVYGDQSLHRELREQTVHYIADHLDHESPLIEGDVGEFIIAAA |
| | | QDGAWAGYPELLAMGQMLNVNIHLTTGGRLESPTVSTMIHYLGPED |
| | | SLRPSIWLSWLSNGHYDAVEDHSYPNPEYDNWCKQTQVQRKRDEEL |
| | | AKSMAISLSKMYIEQNACS |
| CFP-P2A-a- | 275 | MVSKGEELFTGVVPILVELDGDVNGHKFSVSGEGEGDATYGKLTLK |
| YFPnanobody- | | FICTTGKLPVPWPTLVTTLTWGVQCFSRYPDHMKQHDFFKSAMPEG |
| TRABID | | YVQERTIFFKDDGNYKTRAEVKFEGDTLVNRIELKGIDFKEDGNIL |
| enDUB | | GHKLEYNYISHNVYITADKQKNGIKANFKIRHNIEDGSVQLADHYQ |
| | | QNTPIGDGPVLLPDNHYLSTQSALSKDPNEKRDHMVLLEFVTAAGI |
| | | TLGMDELYKGSGATNFSLLKQAGDVEENPGPQVQLVESGGALVQPG |
| | | GSLRLSCAASGFPVNRYSMRWYRQAPGKEREWVAGMSSAGDRSSYE |
| | | DSVKGRFTISRDDARNTVYLQMNSLKPEDTAVYYCNVNVGFEYWGQ |
| | | GTQVTVSSLEVDFKKLKQIKNRMKKTDWLFLNACVGVVEGDLAAIE |
| | | AYKSSGGDIARQLTADEVRLLNRPSAFDVGYTLVHLAIRFQRQDML |
| | | AILLTEVSQQAAKCIPAMVCPELTEQIRREIAASLHQRKGDFACYF |
| | | LTDLVTFTLPADIEDLPPTVQEKLEDEVLDRDVQKELEEESPIINW |
| | | SLELATRLDSRLYALWNRTAGDCLLDSVLQATWGIYDKDSVLRKAL |
| | | HDSLHDCSHWFYTRWKDWESWYSQSFGLHESLREEQWQEDWAFILS |
| | | LASQPGASLEQTHIFVLAHILRRPIIVYGVKYYKSFRGETLGYTRE |
| | | QGVYLPLLWEQSFCWKSPIALGYTRGHFSALVAMENDGYGNRGAGA |
| | | NLNTDDDVTITELPLVDSERKLLHVHELSAQELGNEEQQEKLLREW |
| | | LDCCVTEGGVLVAMQKSSRRRNHPLVTQMVEKWLDRYRQIRPCTSL |
| CFP-P2A-a- | 276 | MVSKGEELFTGVVPILVELDGDVNGHKESVSGEGEGDATYGKLTLK |
| YFPnanobody- | | FICTTGKLPVPWPTLVTTLTWGVQCFSRYPDHMKQHDFFKSAMPEG |
| USP21 enDUB | | YVQERTIFFKDDGNYKTRAEVKFEGDTLVNRIELKGIDFKEDGNIL |
| | | GHKLEYNYISHNVYITADKQKNGIKANFKIRHNIEDGSVQLADHYQ |
| | | QNTPIGDGPVLLPDNHYLSTQSALSKDPNEKRDHMVLLEFVTAAGI |
| | | TLGMDELYKGSGATNFSLLKQAGDVEENPGPQVQLVESGGALVQPG |
| | | GSLRLSCAASGFPVNRYSMRWYRQAPGKEREWVAGMSSAGDRSSYE |
| | | DSVKGRFTISRDDARNTVYLQMNSLKPEDTAVYYCNVNVGFEYWGQ |
| | | GTQVTVSSSDDKMAHHTLLLGSGHVGLRNLGNTCFLNAVLQCLSST |
| | | RPLRDFCLRRDFRQEVPGGGRAQELTEAFADVIGALWHPDSCEAVN |
| | | PTRFRAVFQKYVPSFSGYSQQDAQEFLKLLMERLHLEINRRGRRAP |
| | | PILANGPVPSPPRRGGALLEEPELSDDDRANLMWKRYLEREDSKIV |
| | | DLFVGQLKSCLKCQACGYRSTTFEVECDLSLPIPKKGFAGGKVSLR |
| | | DCFNLFTKEEELESENAPVCDRCRQKTRSTKKLTVQRFPRILVLHL |
| | | NRFSASRGSIKKSSVGVDFPLQRLSLGDFASDKAGSPVYQLYALCN |
| | | HSGSVHYGHYTALCRCQTGWHVYNDSRVSPVSENQVASSEGYVLFY |
| | | QLMQEPPRCL |
| CFP-P2A-a- | 277 | MVSKGEELFTGVVPILVELDGDVNGHKFSVSGEGEGDATYGKLTLK |
| YFPnanobody- | | FICTTGKLPVPWPTLVTTLTWGVQCESRYPDHMKQHDFFKSAMPEG |
| OTUD4 enDUB | | YVQERTIFFKDDGNYKTRAEVKFEGDTLVNRIELKGIDFKEDGNIL |
| | | GHKLEYNYISHNVYITADKQKNGIKANFKIRHNIEDGSVQLADHYQ |
| | | QNTPIGDGPVLLPDNHYLSTQSALSKDPNEKRDHMVLLEFVTAAGI |
| | | TLGMDELYKGSGATNFSLLKQAGDVEENPGPQVQLVESGGALVQPG |
| | | GSLRLSCAASGFPVNRYSMRWYRQAPGKEREWVAGMSSAGDRSSYE |
| | | DSVKGRFTISRDDARNTVYLQMNSLKPEDTAVYYCNVNVGFEYWGQ |
| | | GTQVTVSSATPMDAYLRKLGLYRKLVAKDGSCLFRAVAEQVLHSQS |
| | | RHVEVRMACIHYLRENREKFEAFIEGSFEEYLKRLENPQEWVGQVE |
| | | ISALSLMYRKDFIIYREPNVSPSQVTENNFPEKVLLCESNGNHYDI |
| | | VYPIKYKESSAMCQSLLYELLYEKVFKTDVSKIVMELDTLEVADE |
| CFP-P2A-anti- | 278 | MVSKGEELFTGVVPILVELDGDVNGHKESVSGEGEGDATYGKLTLK |
| beta 2 | | FICTTGKLPVPWPTLVTTLTWGVQCFSRYPDHMKQHDFFKSAMPEG |
| adrenergic | | YVQERTIFFKDDGNYKTRAEVKFEGDTLVNRIELKGIDFKEDGNIL |
| receptor | | GHKLEYNYISHNVYITADKQKNGIKANFKIRHNIEDGSVQLADHYQ |
| targeting binder- | | QNTPIGDGPVLLPDNHYLSTQSALSKDPNEKRDHMVLLEFVTAAGI |
| Cezanne enDUB | | TLGMDELYKGSGATNESLLKQAGDVEENPGPQVQLQESGGGLVQAG |
| | | GSLRLSCAASGSIFALNIMGWYRQAPGKQRELVAAIHSGGTTNYAN |
| | | SVKGRFTISRDNAANTVYLQMNSLKPEDTAVYYCNVKDEGAIIYDY |
| | | DYWGQGTQVTVSSPPSFSEGSGGSRTPEKGESDREPTRPPRPILQR |
| | | QDDIVQEKRLSRGISHASSSIVSLARSHVSSNGGGGGSNEHPLEMP |
| | | ICAFQLPDLTVYNEDERSFIERDLIEQSMLVALEQAGRLNWWVSVD |
| | | PTSQRLLPLATTGDGNCLLHAASLGMWGFHDRDLMLRKALYALMEK |
| | | GVEKEALKRRWRWQQTQQNKESGLVYTEDEWQKEWNELIKLASSEP |
| | | RMHLGTNGANCGGVESSEEPVYESLEEFHVEVLAHVLRRPIVVVAD |
| | | TMLRDSGGEAFAPIPFGGIYLPLEVPASQCHRSPLVLAYDQAHFSA |
| | | LVSMEQKENTKEQAVIPLTDSEYKLLPLHFAVDPGKGWEWGKDDSD |
| | | NVRLASVILSLEVKLHLLHSYMNVKWIPLSSDAQAPLAQ |
| CFP-P2A-anti- | 279 | MVSKGEELFTGVVPILVELDGDVNGHKESVSGEGEGDATYGKLTLK |
| beta 2 | | FICTTGKLPVPWPTLVTTLTWGVQCESRYPDHMKQHDFFKSAMPEG |
| adrenergic | | YVQERTIFFKDDGNYKTRAEVKFEGDTLVNRIELKGIDFKEDGNIL |
| receptor | | GHKLEYNYISHNVYITADKQKNGIKANFKIRHNIEDGSVQLADHYQ |
| targeting binder- | | QNTPIGDGPVLLPDNHYLSTQSALSKDPNEKRDHMVLLEFVTAAGI |
| OTUD1 enDUB | | TLGMDELYKGSGATNFSLLKQAGDVEENPGPQVQLQESGGGLVQAG |
| | | GSLRLSCAASGSIFALNIMGWYRQAPGKQRELVAAIHSGGTTNYAN |
| | | SVKGRFTISRDNAANTVYLQMNSLKPEDTAVYYCNVKDEGAIIYDY |
| | | DYWGQGTQVTVSSDEKLALYLAEVEKQDKYLRQRNKYRFHIIPDGN |
| | | CLYRAVSKTVYGDQSLHRELREQTVHYIADHLDHESPLIEGDVGEF |
| | | IIAAAQDGAWAGYPELLAMGQMLNVNIHLTTGGRLESPTVSTMIHY |
| | | LGPEDSLRPSIWLSWLSNGHYDAVEDHSYPNPEYDNWCKQTQVQRK |
| | | RDEELAKSMAISLSKMYIEQNACS |
| CFP-P2A-anti- | 280 | MVSKGEELFTGVVPILVELDGDVNGHKESVSGEGEGDATYGKLTLK |
| beta 2 | | FICTTGKLPVPWPTLVTTLTWGVQCFSRYPDHMKQHDFFKSAMPEG |
| adrenergic | | YVQERTIFFKDDGNYKTRAEVKFEGDTLVNRIELKGIDFKEDGNIL |
| receptor | | GHKLEYNYISHNVYITADKQKNGIKANFKIRHNIEDGSVQLADHYQ |
| targeting binder- | | QNTPIGDGPVLLPDNHYLSTQSALSKDPNEKRDHMVLLEFVTAAGI |
| TRABID | | TLGMDELYKGSGATNFSLLKQAGDVEENPGPQVQLQESGGGLVQAG |
| enDUB | | GSLRLSCAASGSIFALNIMGWYRQAPGKQRELVAAIHSGGTTNYAN |
| | | SVKGRFTISRDNAANTVYLQMNSLKPEDTAVYYCNVKDEGAIIYDY |
| | | DYWGQGTQVTVSSLEVDFKKLKQIKNRMKKTDWLFLNACVGVVEGD |
| | | LAAIEAYKSSGGDIARQLTADEVRLLNRPSAFDVGYTLVHLAIRFQ |
| | | RQDMLAILLTEVSQQAAKCIPAMVCPELTEQIRREIAASLHQRKGD |
| | | FACYFLTDLVTFTLPADIEDLPPTVQEKLEDEVLDRDVQKELEEES |
| | | PIINWSLELATRLDSRLYALWNRTAGDCLLDSVLQATWGIYDKDSV |
| | | LRKALHDSLHDCSHWFYTRWKDWESWYSQSFGLHESLREEQWQEDW |
| | | AFILSLASQPGASLEQTHIFVLAHILRRPIIVYGVKYYKSERGETL |
| | | GYTRFQGVYLPLLWEQSFCWKSPIALGYTRGHFSALVAMENDGYGN |
| | | RGAGANLNTDDDVTITFLPLVDSERKLLHVHELSAQELGNEEQQEK |
| | | LLREWLDCCVTEGGVLVAMQKSSRRRNHPLVTQMVEKWLDRYRQIR |
| | | PCTSLS |
| CFP-P2A-anti- | 281 | MVSKGEELFTGVVPILVELDGDVNGHKFSVSGEGEGDATYGKLTLK |
| beta 2 | | FICTTGKLPVPWPTLVTTLTWGVQCFSRYPDHMKQHDFFKSAMPEG |
| adrenergic | | YVQERTIFFKDDGNYKTRAEVKFEGDTLVNRIELKGIDFKEDGNIL |
| receptor | | GHKLEYNYISHNVYITADKQKNGIKANFKIRHNIEDGSVQLADHYQ |
| targeting binder- | | QNTPIGDGPVLLPDNHYLSTQSALSKDPNEKRDHMVLLEFVTAAGI |
| USP21 enDUB | | TLGMDELYKGSGATNE |
| | | QVQLQESGGGLVQAGGSLRLSCAASGSIFALNIMGWYRQAPGKQRE |
| | | LVAAIHSGGTTNYANSVKGRFTISRDNAANTVYLQMNSLKPEDTAV |
| | | YYCNVKDFGAIIYDYDYWGQGTQVTVSSSDDKMAHHTLLLGSGHVG |
| | | LRNLGNTCFLNAVLQCLSSTRPLRDFCLRRDERQEVPGGGRAQELT |
| | | EAFADVIGALWHPDSCEAVNPTRFRAVFQKYVPSFSGYSQQDAQEF |
| | | LKLLMERLHLEINRRGRRAPPILANGPVPSPPRRGGALLEEPELSD |
| | | DDRANLMWKRYLEREDSKIVDLFVGQLKSCLKCQACGYRSTTFEVE |
| | | CDLSLPIPKKGFAGGKVSLRDCENLFTKEEELESENAPVCDRCRQK |
| | | TRSTKKLTVQRFPRILVLHLNRESASRGSIKKSSVGVDFPLQRLSL |
| | | GDFASDKAGSPVYQLYALCNHSGSVHYGHYTALCRCQTGWHVYNDS |
| | | RVSPVSENQVASSEGYVLFYQLMQEPPRCL |
| CFP-P2A-anti- | 282 | MVSKGEELFTGVVPILVELDGDVNGHKESVSGEGEGDATYGKLTLK |
| beta 2 | | FICTTGKLPVPWPTLVTTLTWGVQCFSRYPDHMKQHDFFKSAMPEG |
| adrenergic | | YVQERTIFFKDDGNYKTRAEVKFEGDTLVNRIELKGIDFKEDGNIL |
| receptor | | GHKLEYNYISHNVYITADKQKNGIKANFKIRHNIEDGSVQLADHYQ |
| targeting binder- | | QNTPIGDGPVLLPDNHYLSTQSALSKDPNEKRDHMVLLEFVTAAGI |
| OTUD4 enDUB | | TLGMDELYKGSGATNFSLLKQAGDVEENPGPQVQLQESGGGLVQAG |
| | | GSLRLSCAASGSIFALNIMGWYRQAPGKQRELVAAIHSGGTTNYAN |
| | | SVKGRFTISRDNAANTVYLQMNSLKPEDTAVYYCNVKDEGAIIYDY |
| | | DYWGQGTQVTVSSATPMDAYLRKLGLYRKLVAKDGSCLFRAVAEQV |
| | | LHSQSRHVEVRMACIHYLRENREKFEAFIEGSFEEYLKRLENPQEW |
| | | VGQVEISALSLMYRKDFIIYREPNVSPSQVTENNFPEKVLLCESNG |
| | | NHYDIVYPIKYKESSAMCQSLLYELLYEKVFKTDVSKIVMELDTLE |
| | | VADE |
| CFP-P2A-anti- | 283 | MVSKGEELFTGVVPILVELDGDVNGHKFSVSGEGEGDATYGKLTLK |
| Kappa-type | | FICTTGKLPVPWPTLVTTLTWGVQCFSRYPDHMKQHDFFKSAMPEG |
| opioid receptor | | YVQERTIFFKDDGNYKTRAEVKFEGDTLVNRIELKGIDFKEDGNIL |
| targeting binder- | | GHKLEYNYISHNVYITADKQKNGIKANFKIRHNIEDGSVQLADHYQ |
| Cezanne enDUB | | QNTPIGDGPVLLPDNHYLSTQSALSKDPNEKRDHMVLLEFVTAAGI |
| | | TLGMDELYKGSGATNFSLLKQAGDVEENPGPMAQVQLVESGGGLVR |
| | | PGGSLRLSCVDSERTSYPMGWFRRAPGKEREFVASITWSGIDPTYA |
| | | DSVADRETTSRDVANNTLYLQMNSLKHEDTAVYYCAARAPVGQSSS |
| | | PYDYDYWGQGTQVTVSSHHHHHHEPEAPPSFSEGSGGSRTPEKGES |
| | | DREPTRPPRPILQRQDDIVQEKRLSRGISHASSSIVSLARSHVSSN |
| | | GGGGGSNEHPLEMPICAFQLPDLTVYNEDERSFIERDLIEQSMLVA |
| | | LEQAGRLNWWVSVDPTSQRLLPLATTGDGNCLLHAASLGMWGFHDR |
| | | DLMLRKALYALMEKGVEKEALKRRWRWQQTQQNKESGLVYTEDEWQ |
| | | KEWNELIKLASSEPRMHLGTNGANCGGVESSEEPVYESLEEFHVEV |
| | | LAHVLRRPIVVVADTMLRDSGGEAFAPIPEGGIYLPLEVPASQCHR |
| | | SPLVLAYDQAHFSALVSMEQKENTKEQAVIPLTDSEYKLLPLHFAV |
| | | DPGKGWEWGKDDSDNVRLASVILSLEVKLHLLHSYMNVKWIPLSSD |
| | | AQAPLAQ |
| CFP-P2A-anti- | 284 | MVSKGEELFTGVVPILVELDGDVNGHKFSVSGEGEGDATYGKLTLK |
| Kappa-type | | FICTTGKLPVPWPTLVTTLTWGVQCFSRYPDHMKQHDFFKSAMPEG |
| opioid receptor | | YVQERTIFFKDDGNYKTRAEVKFEGDTLVNRIELKGIDFKEDGNIL |
| targeting binder- | | GHKLEYNYISHNVYITADKQKNGIKANFKIRHNIEDGSVQLADHYQ |
| OTUD1 enDUB | | QNTPIGDGPVLLPDNHYLSTQSALSKDPNEKRDHMVLLEFVTAAGI |
| | | TLGMDELYKGSGATNESLLKQAGDVEENPGPMAQVQLVESGGGLVR |
| | | PGGSLRLSCVDSERTSYPMGWFRRAPGKEREFVASITWSGIDPTYA |
| | | DSVADRETTSRDVANNTLYLQMNSLKHEDTAVYYCAARAPVGQSSS |
| | | PYDYDYWGQGTQVTVSSHHHHHHEPEADEKLALYLAEVEKQDKYLR |
| | | QRNKYRFHIIPDGNCLYRAVSKTVYGDQSLHRELREQTVHYIADHL |
| | | DHFSPLIEGDVGEFIIAAAQDGAWAGYPELLAMGQMLNVNIHLTTG |
| | | GRLESPTVSTMIHYLGPEDSLRPSIWLSWLSNGHYDAVEDHSYPNP |
| | | EYDNWCKQTQVQRKRDEELAKSMAISLSKMYIEQNACS |
| CFP-P2A-anti- | 285 | MVSKGEELFTGVVPILVELDGDVNGHKFSVSGEGEGDATYGKLTLK |
| Kappa-type | | FICTTGKLPVPWPTLVTTLTWGVQCFSRYPDHMKQHDFFKSAMPEG |
| opioid receptor | | YVQERTIFFKDDGNYKTRAEVKFEGDTLVNRIELKGIDFKEDGNIL |
| targeting binder- | | GHKLEYNYISHNVYITADKQKNGIKANFKIRHNIEDGSVQLADHYQ |
| TRABID | | QNTPIGDGPVLLPDNHYLSTQSALSKDPNEKRDHMVLLEFVTAAGI |
| enDUB | | TLGMDELYKGSGATNFSLLKQAGDVEENPGPMAQVQLVESGGGLVR |
| | | PGGSLRLSCVDSERTSYPMGWFRRAPGKEREFVASITWSGIDPTYA |
| | | DSVADRFTTSRDVANNTLYLQMNSLKHEDTAVYYCAARAPVGQSSS |
| | | PYDYDYWGQGTQVTVSSHHHHHHEPEALEVDFKKLKQIKNRMKKTD |
| | | WLFLNACVGVVEGDLAAIEAYKSSGGDIARQLTADEVRLLNRPSAF |
| | | DVGYTLVHLAIRFQRQDMLAILLTEVSQQAAKCIPAMVCPELTEQI |
| | | RREIAASLHQRKGDFACYFLTDLVTFTLPADIEDLPPTVQEKLEDE |
| | | VLDRDVQKELEEESPIINWSLELATRLDSRLYALWNRTAGDCLLDS |
| | | VLQATWGIYDKDSVLRKALHDSLHDCSHWFYTRWKDWESWYSQSFG |
| | | LHFSLREEQWQEDWAFILSLASQPGASLEQTHIFVLAHILRRPIIV |
| | | YGVKYYKSFRGETLGYTRFQGVYLPLLWEQSFCWKSPIALGYTRGH |
| | | FSALVAMENDGYGNRGAGANLNTDDDVTITFLPLVDSERKLLHVHE |
| | | LSAQELGNEEQQEKLLREWLDCCVTEGGVLVAMQKSSRRRNHPLVT |
| | | QMVEKWLDRYRQIRPCTSLS |
| CFP-P2A-anti- | 286 | MVSKGEELFTGVVPILVELDGDVNGHKFSVSGEGEGDATYGKLTLK |
| Kappa-type | | FICTTGKLPVPWPTLVTTLTWGVQCFSRYPDHMKQHDFFKSAMPEG |
| opioid receptor | | YVQERTIFFKDDGNYKTRAEVKFEGDTLVNRIELKGIDFKEDGNIL |
| targeting binder- | | GHKLEYNYISHNVYITADKQKNGIKANFKIRHNIEDGSVQLADHYQ |
| USP21 enDUB | | QNTPIGDGPVLLPDNHYLSTQSALSKDPNEKRDHMVLLEFVTAAGI |
| | | TLGMDELYKGSGATNFSLLKQAGDVEENPGPMAQVQLVESGGGLVR |
| | | PGGSLRLSCVDSERTSYPMGWFRRAPGKEREFVASITWSGIDPTYA |
| | | DSVADRETTSRDVANNTLYLQMNSLKHEDTAVYYCAARAPVGQSSS |
| | | PYDYDYWGQGTQVTVSSHHHHHHEPEASDDKMAHHTLLLGSGHVGL |
| | | RNLGNTCFLNAVLQCLSSTRPLRDFCLRRDERQEVPGGGRAQELTE |
| | | AFADVIGALWHPDSCEAVNPTRFRAVFQKYVPSFSGYSQQDAQEFL |
| | | KLLMERLHLEINRRGRRAPPILANGPVPSPPRRGGALLEEPELSDD |
| | | DRANLMWKRYLEREDSKIVDLFVGQLKSCLKCQACGYRSTTFEVFC |
| | | DLSLPIPKKGFAGGKVSLRDCENLFTKEEELESENAPVCDRCRQKT |
| | | RSTKKLTVQRFPRILVLHLNRESASRGSIKKSSVGVDFPLQRLSLG |
| | | DFASDKAGSPVYQLYALCNHSGSVHYGHYTALCRCQTGWHVYNDSR |
| | | VSPVSENQVASSEGYVLFYQLMQEPPRCL |
| CFP-P2A-anti- | 287 | MVSKGEELFTGVVPILVELDGDVNGHKFSVSGEGEGDATYGKLTLK |
| Kappa-type | | FICTTGKLPVPWPTLVTTLTWGVQCFSRYPDHMKQHDFFKSAMPEG |
| opioid receptor | | YVQERTIFFKDDGNYKTRAEVKFEGDTLVNRIELKGIDFKEDGNIL |
| targeting binder- | | GHKLEYNYISHNVYITADKQKNGIKANFKIRHNIEDGSVQLADHYQ |
| OTUD4 enDUB | | QNTPIGDGPVLLPDNHYLSTQSALSKDPNEKRDHMVLLEFVTAAGI |
| | | TLGMDELYKGSGATNFSLLKQAGDVEENPGPMAQVQLVESGGGLVR |
| | | PGGSLRLSCVDSERTSYPMGWERRAPGKEREFVASITWSGIDPTYA |
| | | DSVADRETTSRDVANNTLYLQMNSLKHEDTAVYYCAARAPVGQSSS |
| | | PYDYDYWGQGTQVTVSSHHHHHHEPEAATPMDAYLRKLGLYRKLVA |
| | | KDGSCLFRAVAEQVLHSQSRHVEVRMACIHYLRENREKFEAFIEGS |
| | | FEEYLKRLENPQEWVGQVEISALSLMYRKDFIIYREPNVSPSQVTE |
| | | NNFPEKVLLCESNGNHYDIVYPIKYKESSAMCQSLLYELLYEKVEK |
| | | TDVSKIVMELDTLEVADE |
| CFP-P2A-anti- | 288 | MVSKGEELFTGVVPILVELDGDVNGHKFSVSGEGEGDATYGKLTLK |
| Muscarinic | | FICTTGKLPVPWPTLVTTLTWGVQCFSRYPDHMKQHDFFKSAMPEG |
| acetylcholine | | YVQERTIFFKDDGNYKTRAEVKFEGDTLVNRIELKGIDFKEDGNIL |
| receptor M2 | | GHKLEYNYISHNVYITADKQKNGIKANFKIRHNIEDGSVQLADHYQ |
| targeting binder- | | QNTPIGDGPVLLPDNHYLSTQSALSKDPNEKRDHMVLLEFVTAAGI |
| Cezanne enDUB | | TLGMDELYKGSGATNFSLLKQAGDVEENPGPGPGSQVQLQESGGGL |
| | | VQAGDSLRLSCAASGEDEDNEDDYAIGWFRQAPGQEREGVSCIDPS |
| | | DGSTIYADSAKGRFTISSDNAENTVYLQMNSLKPEDTAVYVCSAWT |
| | | LFHSDEYWGQGTQVTVSSPPSFSEGSGGSRTPEKGESDREPTRPPR |
| | | PILQRQDDIVQEKRLSRGISHASSSIVSLARSHVSSNGGGGGSNEH |
| | | PLEMPICAFQLPDLTVYNEDERSFIERDLIEQSMLVALEQAGRLNW |
| | | WVSVDPTSQRLLPLATTGDGNCLLHAASLGMWGFHDRDLMLRKALY |
| | | ALMEKGVEKEALKRRWRWQQTQQNKESGLVYTEDEWQKEWNELIKL |
| | | ASSEPRMHLGTNGANCGGVESSEEPVYESLEEFHVFVLAHVLRRPI |
| | | VVVADTMLRDSGGEAFAPIPEGGIYLPLEVPASQCHRSPLVLAYDQ |
| | | AHFSALVSMEQKENTKEQAVIPLTDSEYKLLPLHFAVDPGKGWEWG |
| | | KDDSDNVRLASVILSLEVKLHLLHSYMNVKWIPLSSDAQAPLAQ |
| CFP-P2A-anti- | 289 | MVSKGEELFTGVVPILVELDGDVNGHKFSVSGEGEGDATYGKLTLK |
| Muscarinic | | FICTTGKLPVPWPTLVTTLTWGVQCFSRYPDHMKQHDFFKSAMPEG |
| acetylcholine | | YVQERTIFFKDDGNYKTRAEVKFEGDTLVNRIELKGIDFKEDGNIL |
| receptor M2 | | GHKLEYNYISHNVYITADKQKNGIKANFKIRHNIEDGSVQLADHYQ |
| targeting binder- | | QNTPIGDGPVLLPDNHYLSTQSALSKDPNEKRDHMVLLEFVTAAGI |
| OTUD1 enDUB | | TLGMDELYKGSGATNFSLLKQAGDVEENPGPGPGSQVQLQESGGGL |
| | | VQAGDSLRLSCAASGEDEDNEDDYAIGWFRQAPGQEREGVSCIDPS |
| | | DGSTIYADSAKGRFTISSDNAENTVYLQMNSLKPEDTAVYVCSAWT |
| | | LFHSDEYWGQGTQVTVSSDEKLALYLAEVEKQDKYLRQRNKYRFHI |
| | | IPDGNCLYRAVSKTVYGDQSLHRELREQTVHYIADHLDHESPLIEG |
| | | DVGEFIIAAAQDGAWAGYPELLAMGQMLNVNIHLTTGGRLESPTVS |
| | | TMIHYLGPEDSLRPSIWLSWLSNGHYDAVEDHSYPNPEYDNWCKQT |
| | | QVQRKRDEELAKSMAISLSKMYIEQNACS |
| CFP-P2A-anti- | 290 | MVSKGEELFTGVVPILVELDGDVNGHKFSVSGEGEGDATYGKLTLK |
| Muscarinic | | FICTTGKLPVPWPTLVTTLTWGVQCFSRYPDHMKQHDFFKSAMPEG |
| acetylcholine | | YVQERTIFFKDDGNYKTRAEVKFEGDTLVNRIELKGIDFKEDGNIL |
| receptor M2 | | GHKLEYNYISHNVYITADKQKNGIKANFKIRHNIEDGSVQLADHYQ |
| targeting binder- | | QNTPIGDGPVLLPDNHYLSTQSALSKDPNEKRDHMVLLEFVTAAGI |
| TRABID | | TLGMDELYKGSGATNFSLLKQAGDVEENPGPGPGSQVQLQESGGGL |
| enDUB | | VQAGDSLRLSCAASGEDEDNEDDYAIGWFRQAPGQEREGVSCIDPS |
| | | DGSTIYADSAKGRFTISSDNAENTVYLQMNSLKPEDTAVYVCSAWT |
| | | LFHSDEYWGQGTQVTVSSLEVDFKKLKQIKNRMKKTDWLFLNACVG |
| | | VVEGDLAAIEAYKSSGGDIARQLTADEVRLLNRPSAFDVGYTLVHL |
| | | AIRFQRQDMLAILLTEVSQQAAKCIPAMVCPELTEQIRREIAASLH |
| | | QRKGDFACYFLTDLVTFTLPADIEDLPPTVQEKLEDEVLDRDVQKE |
| | | LEEESPIINWSLELATRLDSRLYALWNRTAGDCLLDSVLQATWGIY |
| | | DKDSVLRKALHDSLHDCSHWFYTRWKDWESWYSQSFGLHESLREEQ |
| | | WQEDWAFILSLASQPGASLEQTHIFVLAHILRRPIIVYGVKYYKSE |
| | | RGETLGYTRFQGVYLPLLWEQSFCWKSPIALGYTRGHFSALVAMEN |
| | | DGYGNRGAGANLNTDDDVTITFLPLVDSERKLLHVHELSAQELGNE |
| | | EQQEKLLREWLDCCVTEGGVLVAMQKSSRRRNHPLVTQMVEKWLDR |
| | | YRQIRPCTSLS |
| CFP-P2A-anti- | 291 | MVSKGEELFTGVVPILVELDGDVNGHKFSVSGEGEGDATYGKLTLK |
| Muscarinic | | FICTTGKLPVPWPTLVTTLTWGVQCFSRYPDHMKQHDEFKSAMPEG |
| acetylcholine | | YVQERTIFFKDDGNYKTRAEVKFEGDTLVNRIELKGIDFKEDGNIL |
| receptor M2 | | GHKLEYNYISHNVYITADKQKNGIKANFKIRHNIEDGSVQLADHYQ |
| targeting binder- | | QNTPIGDGPVLLPDNHYLSTQSALSKDPNEKRDHMVLLEFVTAAGI |
| USP21 enDUB | | TLGMDELYKGSGATNFSLLKQAGDVEENPGPGPGSQVQLQESGGGL |
| | | VQAGDSLRLSCAASGEDEDNEDDYAIGWFRQAPGQEREGVSCIDPS |
| | | DGSTIYADSAKGRFTISSDNAENTVYLQMNSLKPEDTAVYVCSAWT |
| | | LFHSDEYWGQGTQVTVSSSDDKMAHHTLLLGSGHVGLRNLGNTCEL |
| | | NAVLQCLSSTRPLRDFCLRRDFRQEVPGGGRAQELTEAFADVIGAL |
| | | WHPDSCEAVNPTRFRAVFQKYVPSFSGYSQQDAQEFLKLLMERLHL |
| | | EINRRGRRAPPILANGPVPSPPRRGGALLEEPELSDDDRANLMWKR |
| | | YLEREDSKIVDLFVGQLKSCLKCQACGYRSTTFEVFCDLSLPIPKK |
| | | GFAGGKVSLRDCENLFTKEEELESENAPVCDRCRQKTRSTKKLTVQ |
| | | RFPRILVLHLNRESASRGSIKKSSVGVDFPLQRLSLGDFASDKAGS |
| | | PVYQLYALCNHSGSVHYGHYTALCRCQTGWHVYNDSRVSPVSENQV |
| | | ASSEGYVLFYQLMQEPPRCL |
| CFP-P2A-anti- | 292 | MVSKGEELFTGVVPILVELDGDVNGHKFSVSGEGEGDATYGKLTLK |
| Muscarinic | | FICTTGKLPVPWPTLVTTLTWGVQCFSRYPDHMKQHDFFKSAMPEG |
| acetylcholine | | YVQERTIFFKDDGNYKTRAEVKFEGDTLVNRIELKGIDFKEDGNIL |
| receptor M2 | | GHKLEYNYISHNVYITADKQKNGIKANFKIRHNIEDGSVQLADHYQ |
| targeting binder- | | QNTPIGDGPVLLPDNHYLSTQSALSKDPNEKRDHMVLLEFVTAAGI |
| OTUD4 enDUB | | TLGMDELYKGSGATNFSLLKQAGDVEENPGPGPGSQVQLQESGGGL |
| | | VQAGDSLRLSCAASGEDEDNEDDYAIGWFRQAPGQEREGVSCIDPS |
| | | DGSTIYADSAKGRFTISSDNAENTVYLQMNSLKPEDTAVYVCSAWT |
| | | LFHSDEYWGQGTQVTVSSATPMDAYLRKLGLYRKLVAKDGSCLFRA |
| | | VAEQVLHSQSRHVEVRMACIHYLRENREKFEAFIEGSFEEYLKRLE |
| | | NPQEWVGQVEISALSLMYRKDFIIYREPNVSPSQVTENNFPEKVLL |
| | | CFSNGNHYDIVYPIKYKESSAMCQSLLYELLYEKVEKTDVSKIVME |
| | | LDTLEVADE |

### 6.2 Example 2. Testing of Targeted Engineered Deubiquitinases

[0281] To demonstrate upregulation of a target protein in the context of a specific targeting enDUB the following experiments will be performed.

[0282] Schematic constructs used:
[0283] Control experiment using non-targeting enDUB fusion
   [0284] Target-YFP-P2A-mCherrry
   [0285] CFP-P2A-enDUB (nontargeting control enDUB)
[0286] Test constructs for up-regulation:
   [0287] Target-YFP-P2A-mCherry
   [0288] CFP-P2A-a-YFPnanobody-enDUB
[0289] Or specific targeting enDUB fusion composed of
   [0290] CFP-P2A-anti-targeting binder-enDUB

[0291] Co-transfection of both plasmids carrying the YFP tagged target protein together with the enDUB fused to a target binding protein into HEK cells will be performed. A control construct carrying the enDUB in the absence of the targeting binder will also be co-transfected together with the labeled target protein. After 24-48 hours the transfected cells will be analyzed by FACS or upregulation over the control. The mCherry signal on the target protein will be used to normalize for transfection efficiency while the CFP signal will be used to normalize for the transfection efficiency of the enDUB constructs. The YFP fused to the target protein is the read-out for target gene expression and will be plotted vs the signal in the control transfection. Relative increase in the YFP fluorescence over control will demonstrate upregulation in the presence of the enDUB.

### 6.3 Example 3. Screening Assay for Testing Fusion Proteins

[0292] The following example describes an assay to analyze the ability of a targeted engineered deubiquitinase (enDub) (e.g., an enDub described herein) to increase expression of a target protein. Generally, the assay involves tagging the target protein with a fluorescent tag (e.g., NanoLuciferase (NLuc)) and an alfa-tag (α-Tag); and tagging a fusion protein of the enDub and an anti-alfa Tag nanobody with a different fluorescent tag (e.g., Firefly Luciferase (FLuc)) through a cleavable linker. The use of two different fluorescent tags enables normalization of the signal to compensate for variation in transfection/expression, as the second fluorescent tag is rapidly cleaved from the enDub-anti-alfa tag fusion protein inside the cell through cleavage of the cleavable linker. FIG. 2 provides a general schematic of the cellular aspects of the assay. The protocol, including materials and methods is described below.

[0293] CHO-K1 cells were digested with 0.25% (w/v) Trypsin-EDTA, at 37° C., for 5 min. Complete medium was added for the CHO-K1 cell cultures to stop the digestion. The CHO-K1 cells were centrifuges at 800 rpm for 5 minutes. After centrifugation, the supernatant was discarded and the CHO-K1 cells were resuspend in 2 mL culture medium and counted. 10\hat{ }6 CHO-K1 cells were electroporated under 440V with 0.5 ug of a plasmid encoding the target protein tagged with NLuc and alfa-tag, and 1 ug of a plasmid encoding a) enDub-anti-alfa tag nanobody-FLuc fusion protein (experimental), b) the enDub (control), or the anti-alfa tag nanobody (control). 5E+4 cells/well were placed in in 24 well plates and cultured for 24 h, at 37° C., 5% CO₂. The cells were digested with 0.25% (w/v) Trypsin-EDTA, at 37° C. for 5 min. Complete medium was added to the culture to stop the digestion and the cells were counted for use in NanoGlo® Dual Luciferase® Assay (Promega), which enables detection of FLuc and NLuc® in a single sample. The NanoGlo® Dual Luciferase® Assay was carried out according to manufacturer's instructions (Promega, Nano-Glo® Dual-Luciferase® Reporter Assay Technical Manual #TM426). Briefly, 1E+4 cells/well were placed in 96 well black plates and cultured for 24 h, at 37° C., 5% CO₂. The plates were removed from the incubator and allowed to equilibrate to room temperature. The samples were modified as needed to have a starting volume of 80 μl per well. All sample wells were injected with 80 μl of ONE-Glo™ EX Reagent and incubated for 3 minutes. The firefly luminescence was read in all sample wells using a 1-second integration time. All sample wells were injected with 80 μl of NanoDLR™ Stop & Glo® Reagent; and incubated for 5 minutes. The NanoLuc® luminescence of all sample wells was read using a 1-second integration time. The dispensing lines were cleaned according to manufacturer's instructions (Nano-Glo® Dual-Luciferase® Reporter Assay Technical Manual #TM426.) and the data analyzed.

[0294] The amino acid sequence of the components of the fusion proteins used in the assay are detailed in Table 6 below.

TABLE 6
Amino acid sequence of components of test fusion proteins

| Description | | SEQ ID NO | Amino Acid Sequence |
|---|---|---|---|
| Fluorescent Protein | NanoLuc | 425 | VFTLEDFVGDWRQTAGYNLDQVLEQGGVSSLFQ |
| | | | NLGVSVTPIQRIVLSGENGLKIDIHVIIPYEGL |
| | | | SGDQMGQIEKIFKVVYPVDDHHFKVILHYGTLV |
| | | | IDGVTPNMIDYFGRPYEGIAVFDGKKITVTGTL |
| | | | WNGNKIIDERLINPDGSLLFRVTINGVTGWRLC |
| | | | ERILA |
| | Firefly | 426 | MEDAKNIKKGPAPFYPLEDGTAGEQLHKAMKRY |
| | Luciferase | | ALVPGTIAFTDAHIEVDITYAEYFEMSVRLAEA |
| | | | MKRYGLNTNHRIVVCSENSLQFFMPVLGALFIG |
| | | | VAVAPANDIYNERELLNSMGISQPTVVFVSKKG |
| | | | LQKILNVQKKLPIIQKIIIMDSKTDYQGFQSMY |
| | | | TFVTSHLPPGENEYDFVPESEDRDKTIALIMNS |
| | | | SGSTGLPKGVALPHRTACVRESHARDPIFGNQI |
| | | | IPDTAILSVVPFHHGFGMFTTLGYLICGFRVVL |
| | | | MYRFEEELFLRSLQDYKIQSALLVPTLESFFAK |
| | | | STLIDKYDLSNLHEIASGGAPLSKEVGEAVAKR |
| | | | FHLPGIRQGYGLTETTSAILITPEGDDKPGAVG |
| | | | KVVPFFEAKVVDLDTGKTLGVNQRGELCVRGPM |
| | | | IMSGYVNNPEATNALIDKDGWLHSGDIAYWDED |
| | | | EHFFIVDRLKSLIKYKGYQVAPAELESILLQHP |
| | | | NIFDAGVAGLPDDDAGELPAAVVVLEHGKTMTE |
| | | | KEIVDYVASQVTTAKKLRGGVVFVDEVPKGLTG |
| | | | KLDARKIREILIKAKKGGKIAVTRLK |

| | | |
|---|---|---|
| Alfa Tag | 427 | PSRLEEELRRRLTEP |
| P2A | 428 | GSGATNFSLLKQAGDVEENPGP |
| Cezanne (Exemplary Catalytic | 429 | PPSFSEGSGGSRTPEKGFSDREPTRPPRPILQR |
| Domain) | | QDDIVQEKRLSRGISHASSSIVSLARSHVSSNG |
| | | GGGGSNEHPLEMPICAFQLPDLTVYNEDERSFI |
| | | ERDLIEQSMLVALEQAGRLNWWVSVDPTSQRLL |
| | | PLATTGDGNCLLHAASLGMWGFHDRDLMLRKAL |
| | | YALMEKGVEKEALKRRWRWQQTQQNKESGLVYT |
| | | EDEWQKEWNELIKLASSEPRMHLGTNGANCGGV |
| | | ESSEEPVYESLEEFHVFVLAHVLRRPIVVVADT |
| | | MLRDSGGEAFAPIPFGGIYLPLEVPASQCHRSP |
| | | LVLAYDQAHFSALVSMEQKENTKEQAVIPLTDS |
| | | EYKLLPLHFAVDPGKGWEWGKDDSDNVRLASVI |
| | | LSLEVKLHLLHSYMNVKWIPLSSDAQAPLAQ |

[0295] The amino acid sequence of exemplary target fusion proteins comprising a target protein, NLuc, and the alfa tag are detailed in Table 7 below.

TABLE 7
Amino Acid Sequence of exemplary Target Protein-NLuc-Alfa Tag Fusion Proteins

| Test Protein | SEQ ID NO | Amino Acid Sequence |
|---|---|---|
| GRIN2A-nanoluc- | 430 | MGRVGYWTLLVLPALLVWRGPAPSAAAEKGPPALNIAVMLGHSHD |
| alfa-tag-fusion | | VTERELRTLWGPEQAAGLPLDVNVVALLMNRTDPKSLITHVCDLM |
| | | SGARIHGLVFGDDTDQEAVAQMLDFISSHTFVPILGIHGGASMIM |
| | | ADKDPTSTFFQFGASIQQQATVMLKIMQDYDWHVESLVTTIFPGY |
| | | REFISFVKTTVDNSFVGWDMQNVITLDTSFEDAKTQVQLKKIHSS |
| | | VILLYCSKDEAVLILSEARSLGLTGYDFFWIVPSLVSGNTELIPK |
| | | EFPSGLISVSYDDWDYSLEARVRDGIGILTTAASSMLEKFSYIPE |
| | | AKASCYGQMERPEVPMHTLHPFMVNVTWDGKDLSFTEEGYQVHPR |
| | | LVVIVLNKDREWEKVGKWENHTLSLRHAVWPRYKSFSDCEPDDNH |
| | | LSIVTLEEAPFVIVEDIDPLTETCVRNTVPCRKFVKINNSTNEGM |
| | | NVKKCCKGFCIDILKKLSRTVKFTYDLYLVTNGKHGKKVNNVWNG |
| | | MIGEVVYQRAVMAVGSLTINEERSEVVDESVPFVETGISVMVSRS |
| | | NGTVSPSAFLEPFSASVWVMMFVMLLIVSAIAVFVFEYESPVGYN |
| | | RNLAKGKAPHGPSFTIGKAIWLLWGLVENNSVPVQNPKGTTSKIM |
| | | VSVWAFFAVIFLASYTANLAAFMIQEEFVDQVTGLSDKKFQRPHD |
| | | YSPPFRFGTVPNGSTERNIRNNYPYMHQYMTKENQKGVEDALVSL |
| | | KTGKLDAFIYDAAVLNYKAGRDEGCKLVTIGSGYIFATTGYGIAL |
| | | QKGSPWKRQIDLALLQFVGDGEMEELETLWLTGICHNEKNEVMSS |
| | | QLDIDNMAGVFYMLAAAMALSLITFIWEHLFYWKLRFCFTGVCSD |
| | | RPGLLESISRGIYSCIHGVHIEEKKKSPDENLTGSQSNMLKLLRS |
| | | AKNISSMSNMNSSRMDSPKRAADFIQRGSLIMDMVSDKGNLMYSD |
| | | NRSFQGKESIFGDNMNELQTFVANRQKDNLNNYVFQGQHPLTLNE |
| | | SNPNTVEVAVSTESKANSRPRQLWKKSVDSIRQDSLSQNPVSQRD |
| | | EATAENRTHSLKSPRYLPEEMAHSDISETSNRATCHREPDNSKNH |
| | | KTKDNFKRSVASKYPKDCSEVERTYLKTKSSSPRDKIYTIDGEKE |
| | | PGFHLDPPQFVENVTLPENVDFPDPYQDPSENFRKGDSTLPMNRN |
| | | PLHNEEGLSNNDQYKLYSKHFTLKDKGSPHSETSERYRQNSTHCR |
| | | SCLSNMPTYSGHFTMRSPFKCDACLRMGNLYDIDEDQMLQETGNP |
| | | ATGEQVYQQDWAQNNALQLQKNKLRISRQHSYDNIVDKPRELDLS |
| | | RPSRSISLKDRERLLEGNFYGSLFSVPSSKLSGKKSSLFPQGLED |
| | | SKRSKSLLPDHTSDNPFLHSHRDDQRLVIGRCPSDPYKHSLPSQA |
| | | VNDSYLRSSLRSTASYCSRDSRGHNDVYISEHVMPYAANKNNMYS |
| | | TPRVLNSCSNRRVYKKMPSIESDVKVPVFTLEDFVGDWRQTAGYN |
| | | LDQVLEQGGVSSLFQNLGVSVTPIQRIVLSGENGLKIDIHVIIPY |
| | | EGLSGDQMGQIEKIFKVVYPVDDHHFKVILHYGTLVIDGVTPNMI |
| | | DYFGRPYEGIAVEDGKKITVTGTLWNGNKIIDERLINPDGSLLER |
| | | VTINGVTGWRLCERILAGGGGSPSRLEEELRRRLTEP |
| SLC2A1-nanoluc- | 431 | MEPSSKKLTGRLMLAVGGAVLGSLQFGYNTGVINAPQKVIEEFYN |
| alfa-tag-fusion | | QTWVHRYGESILPTTLTTLWSLSVAIFSVGGMIGSFSVGLFVNRE |
| | | GRRNSMLMMNLLAFVSAVLMGFSKLGKSFEMLILGRFIIGVYCGL |
| | | TTGFVPMYVGEVSPTALRGALGTLHQLGIVVGILIAQVFGLDSIM |
| | | GNKDLWPLLLSIIFIPALLQCIVLPFCPESPRELLINRNEENRAK |
| | | SVLKKLRGTADVTHDLQEMKEESRQMMREKKVTILELFRSPAYRQ |
| | | PILIAVVLQLSQQLSGINAVFYYSTSIFEKAGVQQPVYATIGSGI |
| | | VNTAFTVVSLFVVERAGRRTLHLIGLAGMAGCAILMTIALALLEQ |
| | | LPWMSYLSIVAIFGFVAFFEVGPGPIPWFIVAELFSQGPRPAAIA |
| | | VAGFSNWTSNFIVGMCFQYVEQLCGPYVFIIFTVLLVLFFIFTYF |
| | | KVPETKGRTFDEIASGFRQGGASQSDKTPEELFHPLGADSQVKVP |
| | | VFTLEDFVGDWRQTAGYNLDQVLEQGGVSSLFQNLGVSVTPIQRI |
| | | VLSGENGLKIDIHVIIPYEGLSGDQMGQIEKIFKVVYPVDDHHFK |
| | | VILHYGTLVIDGVTPNMIDYFGRPYEGIAVEDGKKITVTGTLWNG |
| | | NKIIDERLINPDGSLLFRVTINGVTGWRLCERILAGGGGSPSRLE |
| | | EELRRRLTEP |
| CACNA1A- | 432 | MARFGDEMPARYGGGGSGAAAGVVVGSGGGRGAGGSRQGGQPGAQ |
| nanoluc-alfa-tag- | | RMYKQSMAQRARTMALYNPIPVRQNCLTVNRSLFLESEDNVVRKY |
| fusion | | AKKITEWPPFEYMILATIIANCIVLALEQHLPDDDKTPMSERLDD |
| | | TEPYFIGIFCFEAGIKIIALGFAFHKGSYLRNGWNVMDFVVVLTG |
| | | ILATVGTEFDLRTLRAVRVLRPLKLVSGIPSLQVVLKSIMKAMIP |
| | | LLQIGLLLFFAILIFAIIGLEFYMGKFHTTCFEEGTDDIQGESPA |
| | | PCGTEEPARTCPNGTKCQPYWEGPNNGITQFDNILFAVLTVFQCI |
| | | TMEGWTDLLYNSNDASGNTWNWLYFIPLIIIGSFFMLNLVLGVLS |
| | | GEFAKERERVENRRAFLKLRRQQQIERELNGYMEWISKAEEVILA |
| | | EDETDGEQRHPFDALRRTTIKKSKTDLLNPEEAEDQLADIASVGS |
| | | PFARASIKSAKLENSTFFHKKERRMRFYIRRMVKTQAFYWTVLSL |
| | | VALNTLCVAIVHYNQPEWLSDFLYYAEFIFLGLFMSEMFIKMYGL |
| | | GTRPYFHSSENCFDCGVIIGSIFEVIWAVIKPGTSFGISVLRALR |
| | | LLRIFKVTKYWASLRNLVVSLLNSMKSIISLLFLLFLFIVVFALL |
| | | GMQLFGGQFNFDEGTPPTNEDTFPAAIMTVFQILTGEDWNEVMYD |
| | | GIKSQGGVQGGMVFSIYFIVLTLFGNYTLLNVELAIAVDNLANAQ |
| | | ELTKDEQEEEEAANQKLALQKAKEVAEVSPLSAANMSIAVKEQQK |
| | | NQKPAKSVWEQRTSEMRKQNLLASREALYNEMDPDERWKAAYTRH |
| | | LRPDMKTHLDRPLVVDPQENRNNNTNKSRAAEPTVDQRLGQQRAE |
| | | DELRKQARYHDRARDPSGSAGLDARRPWAGSQEAELSREGPYGRE |
| | | SDHHAREGSLEQPGFWEGEAERGKAGDPHRRHVHRQGGSRESRSG |
| | | SPRTGADGEHRRHRAHRRPGEEGPEDKAERRARHREGSRPARGGE |
| | | GEGEGPDGGERRRRHRHGAPATYEGDARREDKERRHRRRKENQGS |
| | | GVPVSGPNLSTTRPIQQDLGRQDPPLAEDIDNMKNNKLATAESAA |
| | | PHGSLGHAGLPQSPAKMGNSTDPGPMLAIPAMATNPQNAASRRTP |
| | | NNPGNPSNPGPPKTPENSLIVTNPSGTQTNSAKTARKPDHTTVDI |
| | | PPACPPPLNHTVVQVNKNANPDPLPKKEEEKKEEEEDDRGEDGPK |
| | | PMPPYSSMFILSTTNPLRRLCHYILNLRYFEMCILMVIAMSSIAL |
| | | AAEDPVQPNAPRNNVLRYFDYVFTGVFTFEMVIKMIDLGLVLHQG |
| | | AYFRDLWNILDFIVVSGALVAFAFTGNSKGKDINTIKSLRVLRVL |
| | | RPLKTIKRLPKLKAVFDCVVNSLKNVENILIVYMLEMFIFAVVAV |
| | | QLFKGKFFHCTDESKEFEKDCRGKYLLYEKNEVKARDREWKKYEF |
| | | HYDNVLWALLTLFTVSTGEGWPQVLKHSVDATFENQGPSPGYRME |
| | | MSIFYVVYFVVFPFFFVNIFVALIIITFQEQGDKMMEEYSLEKNE |
| | | RACIDFAISAKPLTRHMPQNKQSFQYRMWQFVVSPPFEYTIMAMI |
| | | ALNTIVLMMKFYGASVAYENALRVENIVFTSLESLECVLKVMAFG |
| | | ILNYFRDAWNIFDFVTVLGSITDILVTEFGNNFINLSFLRLFRAA |
| | | RLIKLLRQGYTIRILLWTFVQSFKALPYVCLLIAMLFFIYAIIGM |
| | | QVFGNIGIDVEDEDSDEDEFQITEHNNERTFFQALMLLERSATGE |
| | | AWHNIMLSCLSGKPCDKNSGILTRECGNEFAYFYFVSFIFLCSEL |
| | | MLNLFVAVIMDNFEYLTRDSSILGPHHLDEYVRVWAEYDPAAWGR |
| | | MPYLDMYQMLRHMSPPLGLGKKCPARVAYKRLLRMDLPVADDNTV |
| | | HFNSTLMALIRTALDIKIAKGGADKQQMDAELRKEMMAIWPNLSQ |
| | | KTLDLLVTPHKSTDLTVGKIYAAMMIMEYYRQSKAKKLQAMREEQ |
| | | DRTPLMFQRMEPPSPTQEGGPGQNALPSTQLDPGGALMAHESGLK |
| | | ESPSWVTQRAQEMFQKTGTWSPEQGPPTDMPNSQPNSQSVEMREM |
| | | GRDGYSDSEHYLPMEGQGRAASMPRLPAENQRRRGRPRGNNLSTI |
| | | SDTSPMKRSASVLGPKARRLDDYSLERVPPEENQRHHQRRRDRSH |
| | | RASERSLGRYTDVDTGLGTDLSMTTQSGDLPSKERDQERGRPKDR |
| | | KHRQHHHHHHHHHHPPPPDKDRYAQERPDHGRARARDQRWSRSPS |
| | | EGREHMAHRQGSSSVSGSPAPSTSGTSTPRRGRRQLPQTPSTPRP |
| | | HVSYSPVIRKAGGSGPPQQQQQQQQQQQQQAVARPGRAATSGPRR |
| | | YPGPTAEPLAGDRPPTGGHSSGRSPRMERRVPGPARSESPRACRH |
| | | GGARWPASGPHVSEGPPGPRHHGYYRGSDYDEADGPGSGGGEEAM |
| | | AGAYDAPPPVRHASSGATGRSPRTPRASGPACASPSRHGRRLPNG |
| | | YYPAHGLARPRGPGSRKGLHEPYSESDDDWCKVPVFTLEDFVGDW |
| | | RQTAGYNLDQVLEQGGVSSLFQNLGVSVTPIQRIVLSGENGLKID |
| | | IHVIIPYEGLSGDQMGQIEKIFKVVYPVDDHHFKVILHYGTLVID |
| | | GVTPNMIDYFGRPYEGIAVEDGKKITVTGTLWNGNKIIDERLINP |
| | | DGSLLFRVTINGVTGWRLCERILAGGGGSPSRLEEELRRRLTEP |
| GABRB3-nanoluc- | 433 | MWGLAGGRLFGIFSAPVLVAVVCCAQSVNDPGNMSFVKETVDKLL |
| alfa-tag-fusion | | KGYDIRLRPDFGGPPVCVGMNIDIASIDMVSEVNMDYTLTMYFQQ |
| | | YWRDKRLAYSGIPLNLTLDNRVADQLWVPDTYFLNDKKSFVHGVT |
| | | VKNRMIRLHPDGTVLYGLRITTTAACMMDLRRYPLDEQNCTLEIE |
| | | SYGYTTDDIEFYWRGGDKAVTGVERIELPQFSIVEHRLVSRNVVE |
| | | ATGAYPRLSLSFRLKRNIGYFILQTYMPSILITILSWVSFWINYD |
| | | ASAARVALGITTVLTMTTINTHLRETLPKIPYVKAIDMYLMGCFV |
| | | FVFLALLEYAFVNYIFFGRGPQRQKKLAEKTAKAKNDRSKSESNR |
| | | VDAHGNILLTSLEVHNEMNEVSGGIGDTRNSAISEDNSGIQYRKQ |
| | | SMPREGHGRELGDRSLPHKKTHLRRRSSQLKIKIPDLTDVNAIDR |
| | | WSRIVFPFTFSLENLVYWLYYVNKVPVFTLEDFVGDWRQTAGYNL |
| | | DQVLEQGGVSSLFQNLGVSVTPIQRIVLSGENGLKIDIHVIIPYE |
| | | GLSGDQMGQIEKIFKVVYPVDDHHFKVILHYGTLVIDGVTPNMID |
| | | YFGRPYEGIAVEDGKKITVTGTLWNGNKIIDERLINPDGSLLERV |
| | | TINGVTGWRLCERILAGGGGSPSRLEEELRRRLTEP |
| SLC6A1-nanoluc- | 434 | MATNGSKVADGQISTEVSEAPVANDKPKTLVVKVQKKAADLPDRD |
| alfa-tag-fusion | | TWKGRFDFLMSCVGYAIGLGNVWRFPYLCGKNGGGAFLIPYFLTL |
| | | IFAGVPLFLLECSLGQYTSIGGLGVWKLAPMFKGVGLAAAVLSFW |
| | | LNIYYIVIISWAIYYLYNSFTTTLPWKQCDNPWNTDRCESNYSMV |
| | | NTTNMTSAVVEFWERNMHQMTDGLDKPGQIRWPLAITLAIAWILV |
| | | YFCIWKGVGWTGKVVYFSATYPYIMLIILFFRGVTLPGAKEGILF |
| | | YITPNFRKLSDSEVWLDAATQIFFSYGLGLGSLIALGSYNSFHNN |
| | | VYRDSIIVCCINSCTSMFAGFVIFSIVGFMAHVTKRSIADVAASG |
| | | PGLAFLAYPEAVTQLPISPLWAILFFSMLLMLGIDSQFCTVEGFI |
| | | TALVDEYPRLLRNRRELFIAAVCIISYLIGLSNITQGGIYVFKLE |
| | | DYYSASGMSLLFLVFFECVSISWFYGVNRFYDNIQEMVGSRPCIW |
| | | WKLCWSFFTPIIVAGVFIFSAVQMTPLTMGNYVFPKWGQGVGWLM |
| | | ALSSMVLIPGYMAYMFLTLKGSLKQRIQVMVQPSEDIVRPENGPE |
| | | QPQAGSSTSKEAYIKVPVFTLEDFVGDWRQTAGYNLDQVLEQGGV |
| | | SSLFQNLGVSVTPIQRIVLSGENGLKIDIHVIIPYEGLSGDQMGQ |
| | | IEKIFKVVYPVDDHHFKVILHYGTLVIDGVTPNMIDYEGRPYEGI |
| | | AVFDGKKITVTGTLWNGNKIIDERLINPDGSLLFRVTINGVTGWR |
| | | LCERILAGGGGSPSRLEEELRRRLTEP |
| KCNQ2-nanoluc- | 435 | MVQKSRNGGVYPGPSGEKKLKVGFVGLDPGAPDSTRDGALLIAGS |
| alfa-tag-fusion | | EAPKRGSILSKPRAGGAGAGKPPKRNAFYRKLQNFLYNVLERPRG |
| | | WAFIYHAYVELLVESCLVLSVESTIKEYEKSSEGALYILEIVTIV |
| | | VFGVEYFVRIWAAGCCCRYRGWRGRLKFARKPFCVIDIMVLIASI |
| | | AVLAAGSQGNVFATSALRSLRFLQILRMIRMDRRGGTWKLLGSVV |
| | | YAHSKELVTAWYIGELCLILASELVYLAEKGENDHEDTYADALWW |
| | | GLITLTTIGYGDKYPQTWNGRLLAATFTLIGVSFFALPAGILGSG |
| | | FALKVQEQHRQKHFEKRRNPAAGLIQSAWRFYATNLSRTDLHSTW |
| | | QYYERTVTVPMYSSQTQTYGASRLIPPLNQLELLRNLKSKSGLAF |
| | | RKDPPPEPSPSKGSPCRGPLCGCCPGRSSQKVSLKDRVESSPRGV |
| | | AAKGKGSPQAQTVRRSPSADQSLEDSPSKVPKSWSEGDRSRARQA |
| | | FRIKGAASRQNSEEASLPGEDIVDDKSCPCEFVTEDLTPGLKVSI |
| | | RAVCVMRFLVSKRKFKESLRPYDVMDVIEQYSAGHLDMLSRIKSL |
| | | QSRVDQIVGRGPAITDKDRTKGPAEAELPEDPSMMGRLGKVEKQV |
| | | LSMEKKLDELVNIYMQRMGIPPTETEAYFGAKEPEPAPPYHSPED |
| | | SREHVDRHGCIVKIVRSSSSTGQKNFSAPPAAPPVQCPPSTSWQP |
| | | QSHPRQGHGTSPVGDHGSLVRIPPPPAHERSLSAYGGGNRASMEF |
| | | LRQEDTPGCRPPEGNLRDSDTSISIPSVDHEELERSESGFSISQS |
| | | KENLDALNSCYAAVAPCAKVRPYIAEGESDTDSDLCTPCGPPPRS |
| | | ATGEGPFGDVGWAGPRKKVPVFTLEDFVGDWRQTAGYNLDQVLEQ |
| | | GGVSSLFQNLGVSVTPIQRIVLSGENGLKIDIHVIIPYEGLSGDQ |
| | | MGQIEKIFKVVYPVDDHHFKVILHYGTLVIDGVTPNMIDYFGRPY |
| | | EGIAVFDGKKITVTGTLWNGNKIIDERLINPDGSLLERVTINGVT |
| | | GWRLCERILAGGGGSPSRLEEELRRRLTEP |
| SCN8A-nanoluc- | 436 | MAARLLAPPGPDSFKPFTPESLANIERRIAESKLKKPPKADGSHR |
| alfa-tag-fusion | | EDDEDSKPKPNSDLEAGKSLPFIYGDIPQGLVAVPLEDEDPYYLT |
| | | QKTFVVLNRGKTLFRFSATPALYILSPENLIRRIAIKILIHSVES |
| | | MIIMCTILTNCVEMTFSNPPDWSKNVEYTFTGIYTFESLVKIIAR |
| | | GFCIDGFTFLRDPWNWLDESVIMMAYITEFVNLGNVSALRTERVL |
| | | RALKTISVIPGLKTIVGALIQSVKKLSDVMILTVFCLSVFALIGL |
| | | QLFMGNLRNKCVVWPINENESYLENGTKGEDWEEYINNKTNFYTV |
| | | PGMLEPLLCGNSSDAGQCPEGYQCMKAGRNPNYGYTSFDTFSWAF |
| | | LALFRLMTQDYWENLYQLTLRAAGKTYMIFFVLVIFVGSFYLVNL |
| | | ILAVVAMAYEEQNQATLEEAEQKEAEFKAMLEQLKKQQEEAQAAA |
| | | MATSAGTVSEDAIEEEGEEGGGSPRSSSEISKLSSKSAKERRNRR |
| | | KKRKQKELSEGEEKGDPEKVEKSESEDGMRRKAFRLPDNRIGRKE |
| | | SIMNQSLLSIPGSPFLSRHNSKSSIFSFRGPGRERDPGSENEFAD |
| | | DEHSTVEESEGRRDSLFIPIRARERRSSYSGYSGYSQGSRSSRIF |
| | | PSLRRSVKRNSTVDCNGVVSLIGGPGSHIGGRLLPEATTEVEIKK |
| | | KGPGSLLVSMDQLASYGRKDRINSIMSVVTNTLVEELEESQRKCP |
| | | PCWYKFANTFLIWECHPYWIKLKEIVNLIVMDPFVDLAITICIVL |
| | | NTLFMAMEHHPMTPQFEHVLAVGNLVFTGIFTAEMELKLIAMDPY |
| | | YYFQEGWNIFDGFIVSLSLMELSLADVEGLSVLRSERLLRVEKLA |
| | | KSWPTLNMLIKIIGNSVGALGNLTLVLAIIVFIFAVVGMQLFGKS |
| | | YKECVCKINQDCELPRWHMHDFFHSFLIVERVLCGEWIETMWDCM |
| | | EVAGQAMCLIVEMMVMVIGNLVVLNLFLALLLSSFSADNLAATDD |
| | | DGEMNNLQISVIRIKKGVAWTKLKVHAFMQAHFKQREADEVKPLD |
| | | ELYEKKANCIANHTGADIHRNGDFQKNGNGTTSGIGSSVEKYIID |
| | | EDHMSFINNPNLTVRVPIAVGESDFENLNTEDVSSESDPEGSKDK |
| | | LDDTSSSEGSTIDIKPEVEEVPVEQPEEYLDPDACFTEGCVQRFK |
| | | CCQVNIEEGLGKSWWILRKTCFLIVEHNWFETFIIFMILLSSGAL |
| | | AFEDIYIEQRKTIRTILEYADKVETYIFILEMLLKWTAYGFVKFF |
| | | TNAWCWLDELIVAVSLVSLIANALGYSELGAIKSLRTLRALRPLR |
| | | ALSRFEGMRVVVNALVGAIPSIMNVLLVCLIFWLIFSIMGVNLFA |
| | | GKYHYCFNETSEIRFEIEDVNNKTECEKLMEGNNTEIRWKNVKIN |
| | | FDNVGAGYLALLQVATFKGWMDIMYAAVDSRKPDEQPKYEDNIYM |
| | | YIYFVIFIIFGSFFTLNLFIGVIIDNENQQKKKFGGQDIFMTEEQ |
| | | KKYYNAMKKLGSKKPQKPIPRPLNKIQGIVFDFVTQQAFDIVIMM |
| | | LICLNMVTMMVETDTQSKQMENILYWINLVFVIFFTCECVLKMFA |
| | | LRHYYFTIGWNIFDFVVVILSIVGMFLADIIEKYFVSPTLERVIR |
| | | LARIGRILRLIKGAKGIRTLLFALMMSLPALFNIGLLLFLVMFIF |
| | | SIFGMSNFAYVKHEAGIDDMENFETFGNSMICLFQITTSAGWDGL |
| | | LLPILNRPPDCSLDKEHPGSGFKGDCGNPSVGIFFFVSYIIISFL |
| | | IVVNMYIAIILENFSVATEESADPLSEDDFETFYEIWEKFDPDAT |
| | | QFIEYCKLADFADALEHPLRVPKPNTIELIAMDLPMVSGDRIHCL |
| | | DILFAFTKRVLGDSGELDILRQQMEERFVASNPSKVSYEPITTTL |
| | | RRKQEEVSAVVLQRAYRGHLARRGFICKKTTSNKLENGGTHREKK |
| | | ESTPSTASLPSYDSVTKPEKEKQQRAEEGRRERAKRQKEVRESKC |
| | | KVPVFTLEDFVGDWRQTAGYNLDQVLEQGGVSSLFQNLGVSVTPI |
| | | QRIVLSGENGLKIDIHVIIPYEGLSGDQMGQIEKIFKVVYPVDDH |
| | | HFKVILHYGTLVIDGVTPNMIDYFGRPYEGIAVEDGKKITVTGTL |
| | | WNGNKIIDERLINPDGSLLFRVTINGVTGWRLCERILAGGGGSPS |
| | | RLEEELRRRLTEP |
| SCN2A-nanoluc- | 437 | MAQSVLVPPGPDSFRFFTRESLAAIEQRIAEEKAKRPKQERKDED |
| alfa-tag-fusion | | DENGPKPNSDLEAGKSLPFIYGDIPPEMVSVPLEDLDPYYINKKT |
| | | FIVLNKGKAISRFSATPALYILTPENPIRKLAIKILVHSLENMLI |
| | | MCTILTNCVFMTMSNPPDWTKNVEYTFTGIYTFESLIKILARGFC |
| | | LEDFTFLRDPWNWLDFTVITFAYVTEFVDLGNVSALRTERVLRAL |
| | | KTISVIPGLKTIVGALIQSVKKLSDVMILTVECLSVFALIGLQLE |
| | | MGNLRNKCLQWPPDNSSFEINITSFENNSLDGNGTTFNRTVSIEN |
| | | WDEYIEDKSHFYFLEGQNDALLCGNSSDAGQCPEGYICVKAGRNP |
| | | NYGYTSFDTFSWAFLSLERLMTQDFWENLYQLTLRAAGKTYMIFF |
| | | VLVIFLGSFYLINLILAVVAMAYEEQNQATLEEAEQKEAEFQQML |
| | | EQLKKQQEEAQAAAAAASAESRDESGAGGIGVFSESSSVASKLSS |
| | | KSEKELKNRRKKKKQKEQSGEEEKNDRVRKSESEDSIRRKGFRES |
| | | LEGSRLTYEKRFSSPHQSLLSIRGSLFSPRRNSRASLESFRGRAK |
| | | DIGSENDFADDEHSTFEDNDSRRDSLFVPHRHGERRHSNVSQASR |
| | | ASRVLPILPMNGKMHSAVDCNGVVSLVGGPSTLTSAGQLLPEGTT |
| | | TETEIRKRRSSSYHVSMDLLEDPTSRQRAMSIASILTNTMEELEE |
| | | SRQKCPPCWYKFANMCLIWDCCKPWLKVKHLVNLVVMDPFVDLAI |
| | | TICIVLNTLFMAMEHYPMTEQFSSVLSVGNLVETGIFTAEMELKI |
| | | IAMDPYYYFQEGWNIFDGFIVSLSLMELGLANVEGLSVLRSERLL |
| | | RVFKLAKSWPTLNMLIKIIGNSVGALGNLTLVLAIIVFIFAVVGM |
| | | QLFGKSYKECVCKISNDCELPRWHMHDFFHSFLIVERVLCGEWIE |
| | | TMWDCMEVAGQTMCLTVFMMVMVIGNLVVLNLFLALLLSSFSSDN |
| | | LAATDDDNEMNNLQIAVGRMQKGIDFVKRKIREFIQKAFVRKQKA |
| | | LDEIKPLEDLNNKKDSCISNHTTIEIGKDLNYLKDGNGTTSGIGS |
| | | SVEKYVVDESDYMSFINNPSLTVTVPIAVGESDFENLNTEEFSSE |
| | | SDMEESKEKLNATSSSEGSTVDIGAPAEGEQPEVEPEESLEPEAC |
| | | FTEDCVRKFKCCQISIEEGKGKLWWNLRKTCYKIVEHNWFETFIV |
| | | FMILLSSGALAFEDIYIEQRKTIKTMLEYADKVETYIFILEMLLK |
| | | WVAYGFQVYFTNAWCWLDFLIVDVSLVSLTANALGYSELGAIKSL |
| | | RTLRALRPLRALSRFEGMRVVVNALLGAIPSIMNVLLVCLIFWLI |
| | | FSIMGVNLFAGKFYHCINYTTGEMFDVSVVNNYSECKALIESNQT |
| | | ARWKNVKVNFDNVGLGYLSLLQVATFKGWMDIMYAAVDSRNVELQ |
| | | PKYEDNLYMYLYFVIFIIFGSFFTLNLFIGVIIDNFNQQKKKFGG |
| | | QDIFMTEEQKKYYNAMKKLGSKKPQKPIPRPANKFQGMVEDFVTK |
| | | QVFDISIMILICLNMVTMMVETDDQSQEMTNILYWINLVFIVLFT |
| | | GECVLKLISLRYYYFTIGWNIFDFVVVILSIVGMFLAELIEKYFV |
| | | SPTLERVIRLARIGRILRLIKGAKGIRTLLFALMMSLPALENIGL |
| | | LLFLVMFIYAIFGMSNFAYVKREVGIDDMENFETEGNSMICLFQI |
| | | TTSAGWDGLLAPILNSGPPDCDPDKDHPGSSVKGDCGNPSVGIFF |
| | | FVSYIIISFLVVVNMYIAVILENFSVATEESAEPLSEDDFEMFYE |
| | | VWEKFDPDATQFIEFAKLSDFADALDPPLLIAKPNKVQLIAMDLP |
| | | MVSGDRIHCLDILFAFTKRVLGESGEMDALRIQMEEREMASNPSK |
| | | VSYEPITTTLKRKQEEVSAIIIQRAYRRYLLKQKVKKVSSIYKKD |
| | | KGKECDGTPIKEDTLIDKLNENSTPEKTDMTPSTTSPPSYDSVTK |
| | | PEKEKFEKDKSEKEDKGKDIRESKKKVPVFTLEDFVGDWRQTAGY |
| | | NLDQVLEQGGVSSLFQNLGVSVTPIQRIVLSGENGLKIDIHVIIP |
| | | YEGLSGDQMGQIEKIFKVVYPVDDHHFKVILHYGTLVIDGVTPNM |
| | | IDYFGRPYEGIAVEDGKKITVTGTLWNGNKIIDERLINPDGSLLF |
| | | RVTINGVTGWRLCERILAGGGGSPSRLEEELRRRLTEP |
| Scn1a-nanoluc- | 438 | MEQTVLVPPGPDSENFFTRESLAAIERRIAEEKAKNPKPDKKDDD |
| alfa-tag-fusion | | ENGPKPNSDLEAGKNLPFIYGDIPPEMVSEPLEDLDPYYINKKTE |
| | | IVLNKGKAIFRESATSALYILTPFNPLRKIAIKILVHSLESMLIM |
| | | CTILTNCVEMTMSNPPDWTKNVEYTFTGIYTFESLIKIIARGECL |
| | | EDFTELRDPWNWLDFTVITFAYVTEFVDLGNVSALRTERVLRALK |
| | | TISVIPGLKTIVGALIQSVKKLSDVMILTVFCLSVFALIGLQLEM |
| | | GNLRNKCIQWPPTNASLEEHSIEKNITVNYNGTLINETVFEEDWK |
| | | SYIQDSRYHYFLEGELDALLCGNSSDAGQCPEGYMCVKAGRNPNY |
| | | GYTSFDTESWAFLSLERLMTQDFWENLYQLTLRAAGKTYMIFFVL |
| | | VIFLGSFYLINLILAVVAMAYEEQNQATLEEAEQKEAEFQQMIEQ |
| | | LKKQQEAAQQAATATASEHSREPSAAGRLSDSSSEASKLSSKSAK |
| | | ERRNRRKKRKQKEQSGGEEKDEDEFQKSESEDSIRRKGFRESIEG |
| | | NRLTYEKRYSSPHQSLLSIRGSLFSPRRNSRTSLESERGRAKDVG |
| | | SENDFADDEHSTFEDNESRRDSLFVPRRHGERRNSNLSQTSRSSR |
| | | MLAVFPANGKMHSTVDCNGVVSLVGGPSVPTSPVGQLLPEVIIDK |
| | | PATDDNGTTTETEMRKRRSSSFHVSMDFLEDPSQRQRAMSIASIL |
| | | TNTVEELEESRQKCPPCWYKESNIFLIWDCSPYWLKVKHVVNLVV |
| | | MDPFVDLAITICIVLNTLFMAMEHYPMTDHENNVLTVGNLVETGI |
| | | FTAEMELKIIAMDPYYYFQEGWNIFDGFIVTLSLVELGLANVEGL |
| | | SVLRSFRLLRVFKLAKSWPTLNMLIKIIGNSVGALGNLTLVLAII |
| | | VFIFAVVGMQLFGKSYKDCVCKIASDCQLPRWHMNDFFHSFLIVE |
| | | RVLCGEWIETMWDCMEVAGQAMCLTVFMMVMVIGNLVVLNLFLAL |
| | | LLSSFSADNLAATDDDNEMNNLQIAVDRMHKGVAYVKRKIYEFIQ |
| | | QSFIRKQKILDEIKPLDDLNNKKDSCMSNHTAEIGKDLDYLKDVN |
| | | GTTSGIGTGSSVEKYIIDESDYMSFINNPSLTVTVPIAVGESDFE |
| | | NLNTEDESSESDLEESKEKLNESSSSSEGSTVDIGAPVEEQPVVE |
| | | PEETLEPEACFTEGCVQRFKCCQINVEEGRGKQWWNLRRTCFRIV |
| | | EHNWFETFIVEMILLSSGALAFEDIYIDQRKTIKTMLEYADKVET |
| | | YIFILEMLLKWVAYGYQTYFTNAWCWLDFLIVDVSLVSLTANALG |
| | | YSELGAIKSLRTLRALRPLRALSRFEGMRVVVNALLGAIPSIMNV |
| | | LLVCLIFWLIFSIMGVNLFAGKFYHCINTTTGDREDIEDVNNHTD |
| | | CLKLIERNETARWKNVKVNFDNVGFGYLSLLQVATFKGWMDIMYA |
| | | AVDSRNVELQPKYEESLYMYLYFVIFIIFGSFFTLNLFIGVIIDN |
| | | FNQQKKKFGGQDIFMTEEQKKYYNAMKKLGSKKPQKPIPRPGNKF |
| | | QGMVFDFVTRQVEDISIMILICLNMVTMMVETDDQSEYVTTILSR |
| | | INLVFIVLFTGECVLKLISLRHYYFTIGWNIFDFVVVILSIVGME |
| | | LAELIEKYFVSPTLFRVIRLARIGRILRLIKGAKGIRTLLFALMM |
| | | SLPALFNIGLLLFLVMFIYAIFGMSNFAYVKREVGIDDMENFETE |
| | | GNSMICLFQITTSAGWDGLLAPILNSKPPDCDPNKVNPGSSVKGD |
| | | CGNPSVGIFFFVSYIIISELVVVNMYIAVILENESVATEESAEPL |
| | | SEDDFEMFYEVWEKFDPDATQFMEFEKLSQFAAALEPPLNLPQPN |
| | | KLQLIAMDLPMVSGDRIHCLDILFAFTKRVLGESGEMDALRIQME |
| | | ERFMASNPSKVSYQPITTTLKRKQEEVSAVIIQRAYRRHLLKRTV |
| | | KQASFTYNKNKIKGGANLLIKEDMIIDRINENSITEKTDLTMSTA |
| | | ACPPSYDRVTKPIVEKHEQEGKDEKAKGKKVPVFTLEDFVGDWRQ |
| | | TAGYNLDQVLEQGGVSSLFQNLGVSVTPIQRIVLSGENGLKIDIH |
| | | VIIPYEGLSGDQMGQIEKIFKVVYPVDDHHFKVILHYGTLVIDGV |
| | | TPNMIDYFGRPYEGIAVEDGKKITVTGTLWNGNKIIDERLINPDG |
| | | SLLFRVTINGVTGWRLCERILAGGGGSPSRLEEELRRRLTEP |
| Grin2b-nanoluc- | 439 | MKPRAECCSPKFWLVLAVLAVSGSRARSQKSPPSIGIAVILVGTS |
| alfa-tag-fusion | | DEVAIKDAHEKDDFHHLSVVPRVELVAMNETDPKSIITRICDLMS |
| | | DRKIQGVVFADDTDQEAIAQILDFISAQTLTPILGIHGGSSMIMA |
| | | DKDESSMFFQFGPSIEQQASVMLNIMEEYDWYIFSIVTTYFPGYQ |
| | | DFVNKIRSTIENSFVGWELEEVLLLDMSLDDGDSKIQNQLKKLQS |
| | | PIILLYCTKEEATYIFEVANSVGLTGYGYTWIVPSLVAGDTDTVP |
| | | AEFPTGLISVSYDEWDYGLPARVRDGIAIITTAASDMLSEHSFIP |
| | | EPKSSCYNTHEKRIYQSNMLNRYLINVTFEGRNLSFSEDGYQMHP |
| | | KLVIILLNKERKWERVGKWKDKSLQMKYYVWPRMCPETEEQEDDH |
| | | LSIVTLEEAPFVIVESVDPLSGTCMRNTVPCQKRIVTENKTDEEP |
| | | GYIKKCCKGFCIDILKKISKSVKFTYDLYLVTNGKHGKKINGTWN |
| | | GMIGEVVMKRAYMAVGSLTINEERSEVVDFSVPFIETGISVMVSR |
| | | SNGTVSPSAFLEPFSADVWVMMFVMLLIVSAVAVFVFEYESPVGY |
| | | NRCLADGREPGGPSFTIGKAIWLLWGLVENNSVPVQNPKGTTSKI |
| | | MVSVWAFFAVIFLASYTANLAAFMIQEEYVDQVSGLSDKKFQRPN |
| | | DFSPPFRFGTVPNGSTERNIRNNYAEMHAYMGKFNQRGVDDALLS |
| | | LKTGKLDAFIYDAAVLNYMAGRDEGCKLVTIGSGKVFASTGYGIA |
| | | IQKDSGWKRQVDLAILQLFGDGEMEELEALWLTGICHNEKNEVMS |
| | | SQLDIDNMAGVFYMLGAAMALSLITFICEHLFYWQFRHCFMGVCS |
| | | GKPGMVESISRGIYSCIHGVAIEERQSVMNSPTATMNNTHSNILR |
| | | LLRTAKNMANLSGVNGSPQSALDFIRRESSVYDISEHRRSFTHSD |
| | | CKSYNNPPCEENLESDYISEVERTFGNLQLKDSNVYQDHYHHHHR |
| | | PHSIGSASSIDGLYDCDNPPFTTQSRSISKKPLDIGLPSSKHSQL |
| | | SDLYGKESFKSDRYSGHDDLIRSDVSDISTHTVTYGNIEGNAAKR |
| | | RKQQYKDSLKKRPASAKSRREFDEIELAYRRRPPRSPDHKRYFRD |
| | | KEGLRDFYLDQFRTKENSPHWEHVDLTDIYKERSDDFKRDSVSGG |
| | | GPCTNRSHIKHGTGDKHGVVSGVPAPWEKNLTNVEWEDRSGGNFC |
| | | RSCPSKLHNYSTTVTGQNSGRQACIRCEACKKAGNLYDISEDNSL |
| | | QELDQPAAPVAVTSNASTTKYPQSPTNSKAQKKNRNKLRRQHSYD |
| | | TFVDLQKEEAALAPRSVSLKDKGREMDGSPYAHMFEMSAGESTFA |
| | | NNKSSVPTAGHHHHNNPGGGYMLSKSLYPDRVTQNPFIPTFGDDQ |
| | | CLLHGSKSYFFRQPTVAGASKARPDFRALVTNKPVVSALHGAVPA |
| | | RFQKDICIGNQSNPCVPNNKNPRAFNGSSNGHVYEKLSSIESDVK |
| | | VPVFTLEDFVGDWRQTAGYNLDQVLEQGGVSSLFQNLGVSVTPIQ |
| | | RIVLSGENGLKIDIHVIIPYEGLSGDQMGQIEKIFKVVYPVDDHH |
| | | FKVILHYGTLVIDGVTPNMIDYFGRPYEGIAVEDGKKITVTGTLW |
| | | NGNKIIDERLINPDGSLLFRVTINGVTGWRLCERILAGGGGSPSR |
| | | LEEELRRRLTEP |
| SLC50A1-nanoluc- | 440 | MEAGGFLDSLIYGACVVFTLGMESAGLSDLRHMRMTRSVDNVQFL |
| alfa-tag-fusion | | PFLTTEVKKVPVFTLEDFVGDWRQTAGYNLDQVLEQGGVSSLFQN |
| | | LGVSVTPIQRIVLSGENGLKIDIHVIIPYEGLSGDQMGQIEKIFK |
| | | VVYPVDDHHFKVILHYGTLVIDGVTPNMIDYFGRPYEGIAVEDGK |
| | | KITVTGTLWNGNKIIDERLINPDGSLLFRVTINGVTGWRLCERIL |
| | | AGGGGSPSRLEEELRRRLTEP |
| TMEM258- | 441 | MELEAMSRYTSPVNPAVFPHLTVVLLAIGMFFTAWFFVYPFTEQP |
| nanoluc-alfa-tag- | | EDQHKVPVFTLEDFVGDWRQTAGYNLDQVLEQGGVSSLFQNLGVS |
| fusion | | VTPIQRIVLSGENGLKIDIHVIIPYEGLSGDQMGQIEKIFKVVYP |
| | | VDDHHFKVILHYGTLVIDGVTPNMIDYFGRPYEGIAVEDGKKITV |
| | | TGTLWNGNKIIDERLINPDGSLLFRVTINGVTGWRLCERILAGGG |
| | | GSPSRLEEELRRRLTEP |
| FSHR-nanoluc- | 442 | MALLLVSLLAFLSLGSGCHHRICHCSNRVFLCQESKVTEIPSDLP |
| alfa-tag-fusion | | RNAIELKVPVFTLEDFVGDWRQTAGYNLDQVLEQGGVSSLFQNLG |
| | | VSVTPIQRIVLSGENGLKIDIHVIIPYEGLSGDQMGQIEKIFKVV |
| | | YPVDDHHFKVILHYGTLVIDGVTPNMIDYFGRPYEGIAVEDGKKI |
| | | TVTGTLWNGNKIIDERLINPDGSLLFRVTINGVTGWRLCERILAG |
| | | GGGSPSRLEEELRRRLTEP |
| KCNQ1-nanoluc- | 446 | MAAASSPPRAERKRWGWGRLPGARRGSAGLAKKCPFSLELAEGGP |
| alfa-tag-fusion | | AGGALYAPIAPGAPGPAPPASPAAPAAPPVASDLGPRPPVSLDPR |
| | | VSIYSTRRPVLARTHVQGRVYNFLERPTGWKCFVYHFAVELIVLV |
| | | CLIFSVLSTIEQYAWRYYESSLEPYPDALATGTLEWMEIVLVVFF |
| | | GTEYVVRLWSAGCRSKYVGLWGRLRFARKPISIIDLIVVVASMVV |
| | | LCVGSKGQVFATSAIRGIRFLQILRMLHVDRQGGTWRLLGSVVFI |
| | | HRQELITTLYIGELGLIFSSYFVYLAEKDAVNESGRVEFGSYADA |
| | | LWWGVVTVTTIGYGDKVPQTWVGKTIASCFSVFAISFFALPAGIL |
| | | GSGFALKVQQKQRQKHENRQIPAAASLIQTAWRCYAAENPDSSTW |
| | | KIYIRKAPRSHTLLSPSPKPKKSVVVKKKKFKLDKDNGVTPGEKM |
| | | LTVPHITCDPPEERRLDHFSVDGYDSSVRKSPTLLEVSMPHEMRT |
| | | NSFAEDLDLEGETLLTPITHISQLREHHRATIKVIRRMQYFVAKK |
| | | KFQQARKPYDVRDVIEQYSQGHLNLMVRIKELQRRLDQSIGKPSL |
| | | FISVSEKSKDRGSNTIGARLNRVEDKVTQLDQRLALITDMLHQLL |
| | | SLHGGSTPGSGGPPREGGAHITQPCGSGGSVDPELELPSNTLPTY |
| | | EQLTVPRRGPDEGSKVPVFTLEDFVGDWRQTAGYNLDQVLEQGGV |
| | | SSLFQNLGVSVTPIQRIVLSGENGLKIDIHVIIPYEGLSGDQMGQ |
| | | IEKIFKVVYPVDDHHFKVILHYGTLVIDGVTPNMIDYFGRPYEGI |
| | | AVFDGKKITVTGTLWNGNKIIDERLINPDGSLLFRVTINGVTGWR |
| | | LCERILAGGGGSPSRLEEELRRRLTEP |

[0296] The amino acid sequence of exemplary fusion proteins comprising a control or a targeted engineered deubiquitinase are detailed in Table 8 below.

TABLE 8
Amino Acid Sequence of exemplary enDub Control and Screening Fusion Proteins

| Description | SEQ ID NO | Amino Acid Sequence |
|---|---|---|
| FireflyLuciferase- | 443 | MEDAKNIKKGPAPFYPLEDGTAGEQLHKAMKRYALVPGTIAFTDA |
| P2A-nano | | HIEVDITYAEYFEMSVRLAEAMKRYGLNTNHRIVVCSENSLQFEM |
| (Control) | | PVLGALFIGVAVAPANDIYNERELLNSMGISQPTVVFVSKKGLQK |
| | | ILNVQKKLPIIQKIIIMDSKTDYQGFQSMYTFVTSHLPPGENEYD |
| | | FVPESFDRDKTIALIMNSSGSTGLPKGVALPHRTACVRESHARDP |
| | | IFGNQIIPDTAILSVVPFHHGFGMFTTLGYLICGFRVVLMYRFEE |
| | | ELFLRSLQDYKIQSALLVPTLESFFAKSTLIDKYDLSNLHEIASG |
| | | GAPLSKEVGEAVAKRFHLPGIRQGYGLTETTSAILITPEGDDKPG |
| | | AVGKVVPFFEAKVVDLDTGKTLGVNQRGELCVRGPMIMSGYVNNP |
| | | EATNALIDKDGWLHSGDIAYWDEDEHFFIVDRLKSLIKYKGYQVA |
| | | PAELESILLQHPNIFDAGVAGLPDDDAGELPAAVVVLEHGKTMTE |
| | | KEIVDYVASQVTTAKKLRGGVVFVDEVPKGLTGKLDARKIREILI |
| | | KAKKGGKIAVTRLKGSGATNFSLLKQAGDVEENPGPRSGTGSSGE |
| | | VQLQESGGGLVQPGGSLRLSCTASGVTISALNAMAMGWYRQAPGE |
| | | RRVMVAAVSERGNAMYRESVQGRFTVTRDFTNKMVSLQMDNLKPE |
| | | DTAVYYCHVLEDRVDSFHDYWGQGTQVTVSS |
| FireflyLuciferase- | 444 | MEDAKNIKKGPAPFYPLEDGTAGEQLHKAMKRYALVPGTIAFTDA |
| P2A-Cezanne | | HIEVDITYAEYFEMSVRLAEAMKRYGLNTNHRIVVCSENSLQFEM |
| (Control) | | PVLGALFIGVAVAPANDIYNERELLNSMGISQPTVVFVSKKGLQK |
| | | ILNVQKKLPIIQKIIIMDSKTDYQGFQSMYTFVTSHLPPGENEYD |
| | | FVPESEDRDKTIALIMNSSGSTGLPKGVALPHRTACVRESHARDP |
| | | IFGNQIIPDTAILSVVPFHHGFGMFTTLGYLICGERVVLMYRFEE |
| | | ELFLRSLQDYKIQSALLVPTLESFFAKSTLIDKYDLSNLHEIASG |
| | | GAPLSKEVGEAVAKRFHLPGIRQGYGLTETTSAILITPEGDDKPG |
| | | AVGKVVPFFEAKVVDLDTGKTLGVNQRGELCVRGPMIMSGYVNNP |
| | | EATNALIDKDGWLHSGDIAYWDEDEHFFIVDRLKSLIKYKGYQVA |
| | | PAELESILLQHPNIFDAGVAGLPDDDAGELPAAVVVLEHGKTMTE |
| | | KEIVDYVASQVTTAKKLRGGVVFVDEVPKGLTGKLDARKIREILI |
| | | KAKKGGKIAVTRLKGSGATNFSLLKQAGDVEENPGPRSGTGSPPS |
| | | FSEGSGGSRTPEKGFSDREPTRPPRPILQRQDDIVQEKRLSRGIS |
| | | HASSSIVSLARSHVSSNGGGGGSNEHPLEMPICAFQLPDLTVYNE |
| | | DERSFIERDLIEQSMLVALEQAGRLNWWVSVDPTSQRLLPLATTG |
| | | DGNCLLHAASLGMWGFHDRDLMLRKALYALMEKGVEKEALKRRWR |
| | | WQQTQQNKESGLVYTEDEWQKEWNELIKLASSEPRMHLGTNGANC |
| | | GGVESSEEPVYESLEEFHVFVLAHVLRRPIVVVADTMLRDSGGEA |
| | | FAPIPFGGIYLPLEVPASQCHRSPLVLAYDQAHFSALVSMEQKEN |
| | | TKEQAVIPLTDSEYKLLPLHFAVDPGKGWEWGKDDSDNVRLASVI |
| | | LSLEVKLHLLHSYMNVKWIPLSSDAQAPLAQ |
| FireflyLuciferase- | 445 | MEDAKNIKKGPAPFYPLEDGTAGEQLHKAMKRYALVPGTIAFTDA |
| P2A- | | HIEVDITYAEYFEMSVRLAEAMKRYGLNTNHRIVVCSENSLQFEM |
| a_alfatag_nano- | | PVLGALFIGVAVAPANDIYNERELLNSMGISQPTVVFVSKKGLQK |
| Cezanne | | ILNVQKKLPIIQKIIIMDSKTDYQGFQSMYTFVTSHLPPGENEYD |
| | | FVPESEDRDKTIALIMNSSGSTGLPKGVALPHRTACVRESHARDP |
| | | IFGNQIIPDTAILSVVPFHHGFGMFTTLGYLICGFRVVLMYRFEE |
| | | ELFLRSLQDYKIQSALLVPTLFSFFAKSTLIDKYDLSNLHEIASG |
| | | GAPLSKEVGEAVAKRFHLPGIRQGYGLTETTSAILITPEGDDKPG |
| | | AVGKVVPFFEAKVVDLDTGKTLGVNQRGELCVRGPMIMSGYVNNP |
| | | EATNALIDKDGWLHSGDIAYWDEDEHFFIVDRLKSLIKYKGYQVA |
| | | PAELESILLQHPNIFDAGVAGLPDDDAGELPAAVVVLEHGKTMTE |
| | | KEIVDYVASQVTTAKKLRGGVVFVDEVPKGLTGKLDARKIREILI |
| | | KAKKGGKIAVTRLKGSGATNFSLLKQAGDVEENPGPRSGTGSSGE |
| | | VQLQESGGGLVQPGGSLRLSCTASGVTISALNAMAMGWYRQAPGE |
| | | RRVMVAAVSERGNAMYRESVQGRFTVTRDFTNKMVSLQMDNLKPE |
| | | DTAVYYCHVLEDRVDSFHDYWGQGTQVTVSSGAPGSGPPSESEGS |
| | | GGSRTPEKGFSDREPTRPPRPILQRQDDIVQEKRLSRGISHASSS |
| | | IVSLARSHVSSNGGGGGSNEHPLEMPICAFQLPDLTVYNEDERSE |
| | | IERDLIEQSMLVALEQAGRLNWWVSVDPTSQRLLPLATTGDGNCL |
| | | LHAASLGMWGFHDRDLMLRKALYALMEKGVEKEALKRRWRWQQTQ |
| | | QNKESGLVYTEDEWQKEWNELIKLASSEPRMHLGTNGANCGGVES |
| | | SEEPVYESLEEFHVEVLAHVLRRPIVVVADTMLRDSGGEAFAPIP |
| | | FGGIYLPLEVPASQCHRSPLVLAYDQAHFSALVSMEQKENTKEQA |
| | | VIPLTDSEYKLLPLHFAVDPGKGWEWGKDDSDNVRLASVILSLEV |
| | | KLHLLHSYMNVKWIPLSSDAQAPLAQ |

[0297] The assay was conducted with utilizing the tagged proteins and targeted enDubs described above in Tables 7 and 8. The results of the KCNQ1 targeting are shown in FIG. 3, showing a 3.8-fold increase in KCNQ1 protein expression. The results of the SCN1A targeting are shown in FIG. 4, showing a 4.4-fold increase in SCN1A protein expression. The results of the GRIN2B targeting are shown in FIG. 5, showing a 5.3-fold increase in GRIN2B protein expression. The results of the SLC50A1 targeting are shown in FIG. 6, showing a 2.03-fold increase in SLC50A1 protein expression. The results of the TREM258 targeting are shown in FIG. 7, showing a 2.77-fold increase in TREM258 protein expression. The results of the FSHR targeting are shown in FIG. 8, showing a 1.33-fold increase in FSHR protein expression. The control used for the SLC50A1, TREM258, and FSHR experiments is the engineered deubiquitinase without the nanobody targeting the alfa-tag. Normalization of transduction efficiency was performed using the firefly luciferase signal as the reference and the ratio between NLuc signal divided by firefly luciferase signal plotted on the y axes.

[0298] The invention is not to be limited in scope by the specific embodiments described herein. Indeed, various modifications of the invention in addition to those described will become apparent to those skilled in the art from the foregoing description and accompanying figures. Such modifications are intended to fall within the scope of the appended claims.

[0299] All references (e.g., publications or patents or patent applications) cited herein are incorporated herein by reference in their entireties and for all purposes to the same extent as if each individual reference (e.g., publication or patent or patent application) was specifically and individually indicated to be incorporated by reference in its entirety for all purposes. Other embodiments are within the following claims.

The application's sequence listing, which the Patent Office published only in electronic form, follows.

SEQUENCE LISTING (448 sequences)

SEQ ID NO: 1 - protein, 438 aa, Homo sapiens
MCKDYVYDKDIEQIAKEEQGEALKLQASTSTEVSHQQCSVPGLGEKFPTWETTKPELELLGHNPRRRRITSSFTIGLRGLINLGNTCFMNCIVQALTHTPILRDFFLSDRHRCEMPSPELCLVCEMSSLFRELYSGNPSPHVPYKLLHLVWIHARHLAGYRQQDAHEFLIAALDVLHRHCKGDDVGKAANNPNHCNCIIDQIFTGGLQSDVTCQACHGVSTTIDPCWDISLDLPGSCTSFWPMSPGRESSVNGESHIPGITTLTDCLRRFTRPEHLGSSAKIKCGSCQSYQESTKQLTMNKLPVVACFHFKRFEHSAKQRRKITTYISFPLELDMTPFMASSKESRMNGQLQLPTNSGNNENKYSLFAVVNHQGTLESGHYTSFIRHHKDQWFKCDDAVITKASIKDVLDSEGYLLFYHKQVLEHESEKVKEMNTQAY

SEQ ID NO: 2 - protein, 1035 aa, Homo sapiens
MAPRLQLEKAAWRWAETVRPEEVSQEHIETAYRIWLEPCIRGVCRRNCKGNPNCLVGIGEHIWLGEIDENSFHNIDDPNCERRKKNSFVGLTNLGATCYVNTFLQVWFLNLELRQALYLCPSTCSDYMLGDGIQEEKDYEPQTICEHLQYLFALLQNSNRRYIDPSGFVKALGLDTGQQQDAQEFSKLFMSLLEDTLSKQKNPDVRNIVQQQFCGEYAYVTVCNQCGRESKLLSKFYELELNIQGHKQLTDCISEFLKEEKLEGDNRYFCENCQSKQNATRKIRLLSLPCTLNLQLMRFVFDRQTGHKKKLNTYIGFSEILDMEPYVEHKGGSYVYELSAVLIHRGVSAYSGHYIAHVKDPQSGEWYKFNDEDIEKMEGKKLQLGIEEDLAEPSKSQTRKPKCGKGTHCSRNAYMLVYRLQTQEKPNTTVQVPAFLQELVDRDNSKFEEWCIEMAEMRKQSVDKGKAKHEEVKELYQRLPAGAEPYEFVSLEWLQKWLDESTPTKPIDNHACLCSHDKLHPDKISIMKRISEYAADIFYSRYGGGPRLTVKALCKECVVERCRILRLKNQLNEDYKTVNNLLKAAVKGSDGFWVGKSSLRSWRQLALEQLDEQDGDAEQSNGKMNGSTLNKDESKEERKEEEELNFNEDILCPHGELCISENERRLVSKEAWSKLQQYFPKAPEFPSYKECCSQCKILEREGEENEALHKMIANEQKTSLPNLFQDKNRPCLSNWPEDTDVLYIVSQFFVEEWRKFVRKPTRCSPVSSVGNSALLCPHGGLMFTFASMTKEDSKLIALIWPSEWQMIQKLFVVDHVIKITRIEVGDVNPSETQYISEPKLCPECREGLLCQQQRDLREYTQATIYVHKVVDNKKVMKDSAPELNVSSSETEEDKEEAKPDGEKDPDFNQSNGGTKRQKISHQNYIAYQKQVIRRSMRHRKVRGEKALLVSANQTLKELKIQIMHAFSVAPFDQNLSIDGKILSDDCATLGTLGVIPESVILLKADEPIADYAAMDDVMQVCMPEEGFKGTGLLGH

SEQ ID NO: 3 - protein, 520 aa, Homo sapiens
MECPHLSSSVCIAPDSAKFPNGSPSSWCCSVCRSNKSPWVCLTCSSVHCGRYVNGHAKKHYEDAQVPLTNHKKSEKQDKVQHTVCMDCSSYSTYCYRCDDFVVNDTKLGLVQKVREHLQNLENSAFTADRHKKRKLLENSTLNSKLLKVNGSTTAICATGLRNLGNTCFMNAILQSLSNIEQFCCYFKELPAVELRNGKTAGRRTYHTRSQGDNNVSLVEEFRKTLCALWQGSQTAFSPESLFYVVWKIMPNFRGYQQQDAHEFMRYLLDHLHLELQGGFNGVSRSAILQENSTLSASNKCCINGASTVVTAIFGGILQNEVNCLICGTESRKFDPFLDLSLDIPSQFRSKRSKNQENGPVCSLRDCLRSFTDLEELDETELYMCHKCKKKQKSTKKFWIQKLPKVLCLHLKRFHWTAYLRNKVDTYVEFPLRGLDMKCYLLEPENSGPESCLYDLAAVVVHHGSGVGSGHYTAYATHEGRWFHFNDSTVTLTDEETVVKAKAYILFYVEHQAKAGSDKL

SEQ ID NO: 4 - protein, 470 aa, Homo sapiens
QLAPREKLPLSSRRPAAVGAGLQNMGNTCYVNASLQCLTYTPPLANYMLSREHSQTCHRHKGCMLCTMQAHITRALHNPGHVIQPSQALAAGFHRGKQEDAHEFLMFTVDAMKKACLPGHKQVDHHSKDTTLIHQIFGGYWRSQIKCLHCHGISDTFDPYLDIALDIQAAQSVQQALEQLVKPEELNGENAYHCGVCLQRAPASKTLTLHTSAKVLILVLKRFSDVTGNKIAKNVQYPECLDMQPYMSQTNTGPLVYVLYAVLVHAGWSCHNGHYFSYVKAQEGQWYKMDDAEVTASSITSVLSQQAYVLFYIQKSEWERHSESVSRGREPRALGAEDTDRRATQGELKRDHPCLQAPELDEHLVERATQESTLDHWKFLQEQNKTKPEFNVRKVEGTLPPDVLVIHQSKYKCGMKNHHPEQQSSLLNLSSTTPTHQESMNTGTLASLRGRARRSKGKNKHSKRALLVCQ

SEQ ID NO: 5 - protein, 785 aa, Homo sapiens
MPGVIPSESNGLSRGSPSKKNRLSLKFFQKKETKRALDFTDSQENEEKASEYRASEIDQVVPAAQSSPINCEKRENLLPFVGLNNLGNTCYLNSILQVLYFCPGFKSGVKHLFNIISRKKEALKDEANQKDKGNCKEDSLASYELICSLQSLIISVEQLQASFLLNPEKYTDELATQPRRLLNTLRELNPMYEGYLQHDAQEVLQCILGNIQETCQLLKKEEVKNVAELPTKVEEIPHPKEEMNGINSIEMDSMRHSEDFKEKLPKGNGKRKSDTEFGNMKKKVKLSKEHQSLEENQRQTRSKRKATSDTLESPPKIIPKYISENESPRPSQKKSRVKINWLKSATKQPSILSKFCSLGKITTNQGVKGQSKENECDPEEDLGKCESDNTTNGCGLESPGNTVTPVNVNEVKPINKGEEQIGFELVEKLFQGQLVLRTRCLECESLTERREDFQDISVPVQEDELSKVEESSEISPEPKTEMKTLRWAISQFASVERIVGEDKYFCENCHHYTEAERSLLFDKMPEVITIHLKCFAASGLEFDCYGGGLSKINTPLLTPLKLSLEEWSTKPTNDSYGLFAVVMHSGITISSGHYTASVKVTDLNSLELDKGNFVVDQMCEIGKPEPLNEEEARGVVENYNDEEVSIRVGGNTQPSKVLNKKNVEAIGLLGGQKSKADYELYNKASNPDKVASTAFAENRNSETSDTTGTHESDRNKESSDQTGINISGFENKISYVVQSLKEYEGKWLLFDDSEVKVTEEKDFLNSLSPSTSPTSTPYLLFYKKL

SEQ ID NO: 6 - protein, 1235 aa, Homo sapiens
MFGDLFEEEYSTVSNNQYGKGKKLKTKALEPPAPREFTNLSGIRNQGGTCYLNSLLQTLHFTPEFREALFSLGPEELGLFEDKDKPDAKVRIIPLQLQRLFAQLLLLDQEAASTADLTDSFGWTSNEEMRQHDVQELNRILFSALETSLVGTSGHDLIYRLYHGTIVNQIVCKECKNVSERQEDFLDLTVAVKNVSGLEDALWNMYVEEEVFDCDNLYHCGTCDRLVKAAKSAKLRKLPPFLTVSLLRFNFDFVKCERYKETSCYTFPLRINLKPFCEQSELDDLEYIYDLFSVIIHKGGCYGGHYHVYIKDVDHLGNWQFQEEKSKPDVNLKDLQSEEEIDHPLMILKAILLEENNLIPVDQLGQKLLKKIGISWNKKYRKQHGPLRKFLQLHSQIFLLSSDESTVRLLKNSSLQAESDFQRNDQQIFKMLPPESPGLNNSISCPHWFDINDSKVQPIREKDIEQQFQGKESAYMLFYRKSQLQRPPEARANPRYGVPCHLLNEMDAANIELQTKRAECDSANNTFELHLHLGPQYHFFNGALHPVVSQTESVWDLTFDKRKTLGDLRQSIFQLLEFWEGDMVLSVAKLVPAGLHIYQSLGGDELTLCETEIADGEDIFVWNGVEVGGVHIQTGIDCEPLLLNVLHLDTSSDGEKCCQVIESPHVFPANAEVGTVLTALAIPAGVIFINSAGCPGGEGWTAIPKEDMRKTFREQGLRNGSSILIQDSHDDNSLLTKEEKWVTSMNEIDWLHVKNLCQLESEEKQVKISATVNTMVFDIRIKAIKELKLMKELADNSCLRPIDRNGKLLCPVPDSYTLKEAELKMGSSLGLCLGKAPSSSQLFLFFAMGSDVQPGTEMEIVVEETISVRDCLKLMLKKSGLQGDAWHLRKMDWCYEAGEPLCEEDATLKELLICSGDTLLLIEGQLPPLGFLKVPIWWYQLQGPSGHWESHQDQTNCTSSWGRVWRATSSQGASGNEPAQVSLLYLGDIEISEDATLAELKSQAMTLPPFLEFGVPSPAHLRAWTVERKRPGRLLRTDRQPLREYKLGRRIEICLEPLQKGENLGPQDVLLRTQVRIPGERTYAPALDLVWNAAQGGTAGSLRQRVADFYRLPVEKIEIAKYFPEKFEWLPISSWNQQITKRKKKKKQDYLQGAPYYLKDGDTIGVKNLLIDDDDDFSTIRDDTGKEKQKQRALGRRKSQEALHEQSSYILSSAETPARPRAPETSLSIHVGSFR

SEQ ID NO: 7 - protein, 1102 aa, Homo sapiens
MNHQQQQQQQKAGEQQLSEPEDMEMEAGDTDDPPRITQNPVINGNVALSDGHNTAEEDMEDDTSWRSEATFQFTVERFSRLSESVLSPPCFVRNLPWKIMVMPRFYPDRPHQKSVGFFLQCNAESDSTSWSCHAQAVLKIINYRDDEKSFSRRISHLFFHKENDWGFSNFMAWSEVTDPEKGFIDDDKVTFEVFVQADAPHGVAWDSKKHTGYVGLKNQGATCYMNSLLQTLFFTNQLRKAVYMMPTEGDDSSKSVPLALQRVFYELQHSDKPVGTKKLTKSFGWETLDSFMQHDVQELCRVLLDNVENKMKGTCVEGTIPKLFRGKMVSYIQCKEVDYRSDRREDYYDIQLSIKGKKNIFESFVDYVAVEQLDGDNKYDAGEHGLQEAEKGVKFLTLPPVLHLQLMRFMYDPQTDQNIKINDRFEFPEQLPLDEFLQKTDPKDPANYILHAVLVHSGDNHGGHYVVYLNPKGDGKWCKFDDDVVSRCTKEEAIEHNYGGHDDDLSVRHCTNAYMLVYIRESKLSEVLQAVTDHDIPQQLVERLQEEKRIEAQKRKERQEAHLYMQVQIVAEDQFCGHQGNDMYDEEKVKYTVFKVLKNSSLAEFVQSLSQTMGFPQDQIRLWPMQARSNGTKRPAMLDNEADGNKTMIELSDNENPWTIFLETVDPELAASGATLPKFDKDHDVMLFLKMYDPKTRSLNYCGHIYTPISCKIRDLLPVMCDRAGFIQDTSLILYEEVKPNLTERIQDYDVSLDKALDELMDGDIIVFQKDDPENDNSELPTAKEYFRDLYHRVDVIFCDKTIPNDPGFVVTLSNRMNYFQVAKTVAQRLNTDPMLLQFFKSQGYRDGPGNPLRHNYEGTLRDLLQFFKPRQPKKLYYQQLKMKITDFENRRSFKCIWLNSQFREEEITLYPDKHGCVRDLLEECKKAVELGEKASGKLRLLEIVSYKIIGVHQEDELLECLSPATSRTFRIEEIPLDQVDIDKENEMLVTVAHFHKEVFGTFGIPFLLRIHQGEHFREVMKRIQSLLDIQEKEFEKFKFAIVMMGRHQYINEDEYEVNLKDFEPQPGNMSHPRPWLGLDHFNKAPKRSRYTYLEKAIKIHN

SEQ ID NO: 8 - protein, 530 aa, Homo sapiens
MEDDSLYLRGEWQFNHFSKLTSSRPDAAFAEIQRTSLPEKSPLSCETRVDLCDDLAPVARQLAPREKLPLSSRRPAAVGAGLQNMGNTCYVNASLQCLTYTPPLANYMLSREHSQTCHRHKGCMLCTMQAHITRALHNPGHVIQPSQALAAGFHRGKQEDAHEFLMFTVDAMKKACLPGHKQVDHHSKDTTLIHQIFGGYWRSQIKCLHCHGISDTFDPYLDIALDIQAAQSVQQALEQLAKPEELNGENAYHCGVCLQRAPASKTLTLHTSAKVLILVLKRFSDVTGNKIAKNVQYPECLDMQPYMSQPNTGPLVYVLYAVLVHAGWSCHNGHYFSYVKAQEGQWYKMDDAEVTASSITSVLSQQAYVLFYIQKSEWERHSESVSRGREPRALGAEDTDRRATQGELKRDHPCLQAPELDEHLVERATQESTLDHWKFLQEQNKTKPEFNVRKVEGTLPPDVLVIHQSKYKCGMKNHHPEQQSSLLNLSSSTPTHQESMNTGTLASLRGRARRSKGKNKHSKRALLVCQ

SEQ ID NO: 9 - protein, 530 aa, Homo sapiens
MEEDSLYLGGEWQFNHFSKLTSSRPDAAFAEIQRTSLPEKSPLSCETRVDLCDDLAPVARQLAPREKLPLSNRRPAAVGAGLQNMGNTCYVNASLQCLTYTPPLANYMLSREHSQTCHRHKGCMLCTMQAHITRALHNPGHVIQPSQALAAGFHRGKQEDAHEFLMFTVDAMKKACLPGHKQVDHHSKDTTLIHQIFGGYWRSQIKCLHCHGISDTFDPYLDIALDIQAAQSVQQALEQLVKPEELNGENAYHCGVCLQRAPASKMLTLLTSAKVLILVLKRFSDVTGNKIAKNVQYPECLDMQPYMSQPNTGPLVYVLYAVLVHAGWSCHNGHYFSYVKAQEGQWYKMDDAEVTASSITSVLSQQAYVLFYIQKSEWERHSESVSRGREPRALGAEDTDRRATQGELKRDHPCLQAPELDEHLVERATQESTLDHWKFLQEQNKTKPEFNVRKVEGTLPPDVLVIHQSKYKCGMKNHHPEQQSSLLNLSSSTPTHQESMNTGTLASLRGRARRSKGKNKHSKRALLVCQ

SEQ ID NO: 10 - protein, 530 aa, Homo sapiens
MEDDSLYLGGEWQFNHFSKLTSSRPDAAFAEIQRTSLPEKSPLSCETRVDLCDDLAPVARQLAPREKPPLSSRRPAAVGAGLQNMGNTCYVNASLQCLTYKPPLANYMLFREHSQTCHRHKGCMLCTMQAHITRALHIPGHVIQPSQALAAGFHRGKQEDAHEFLMFTVDAMRKACLPGHKQVDRHSKDTTLIHQIFGGYWRSQIKCLHCHGISDTFDPYLDIALDIQAAQSVQQALEQLVKPEELNGENAYHCGVCLQRAPASKTLTLHNSAKVLILVLKRFPDVTGNKIAKNVQYPECLDMQPYMSQQNTGPLVYVLYAVLVHAGWSCHNGHYSSYVKAQEGQWYKMDDAEVTASSITSVLSQQAYVLFYIQKSEWERHSESVSRGREPRALGVEDTDRRATQGELKRDHPCLQAPELDEHLVERATQESTLDHWKFLQEQNKTKPEFNVRRVEGTVPPDVLVIHQSKYKCRMKNHHPEQQSSLLNLSSTTPTDQESMNTGTLASLRGRTRRSKGKNKHSKRALLVCQ

SEQ ID NO: 11 - protein, 358 aa, Homo sapiens
MDGVLFRAHQCQYVHPCVHVYVTVGLMDPLCERKEKASKQERENPLAHLAAWGLVGLHNIGQTCCLNSLIQVFVMNVDFARILKRITVPRGADEQRRSVPFQMLLLLEKMQDSRQKAVWPLELAYCLQKYNVPLFVQHDAAQLYLKLWNLIKDQIADVHLVERLQALYMIRMKDSLICLDCAMESSRNSSMLTLRLSFFDVDSKPLKTLEDALHCFFQPRELSSKSKCFCENCGKKTRGKQVLKLTHLPQTLTIHLMRFSIRNSQTRKICHSLYFPQSLDFSQILPMKRESCDAEEQSGGQYELFAVIAHVGMADSGHYCVYIRNAVDGKWFCFNDSNICLVSWEDIQCTYGNPNYHW

SEQ ID NO: 12 - protein, 1042 aa, Homo sapiens
MDKILEGLVSSSHPLPLKRVIVRKVVESAEHWLDEAQCEAMFDLTTRLILEGQDPFQRQVGHQVLEAYARYHRPEFESFFNKTFVLGLLHQGYHSLDRKDVAILDYIHNGLKLIMSCPSVLDLFSLLQVEVLRMVCERPEPQLCARLSDLLTDFVQCIPKGKLSITFCQQLVRTIGHFQCVSTQERELREYVSQVTKVSNLLQNIWKAEPATLLPSLQEVFASISSTDASFEPSVALASLVQHIPLQMITVLIRSLTTDPNVKDASMTQALCRMIDWLSWPLAQHVDTWVIALLKGLAAVQKFTILIDVTLLKIELVFNRLWFPLVRPGALAVLSHMLLSFQHSPEAFHLIVPHVVNLVHSFKNDGLPSSTAFLVQLTELIHCMMYHYSGFPDLYEPILEAIKDFPKPSEEKIKLILNQSAWTSQSNSLASCLSRLSGKSETGKTGLINLGNTCYMNSVIQALFMATDFRRQVLSLNLNGCNSLMKKLQHLFAFLAHTQREAYAPRIFFEASRPPWFTPRSQQDCSEYLRFLLDRLHEEEKILKVQASHKPSEILECSETSLQEVASKAAVLTETPRTSDGEKTLIEKMFGGKLRTHIRCLNCRSTSQKVEAFTDLSLAFCPSSSLENMSVQDPASSPSIQDGGLMQASVPGPSEEPVVYNPTTAAFICDSLVNEKTIGSPPNEFYCSENTSVPNESNKILVNKDVPQKPGGETTPSVTDLLNYFLAPEILTGDNQYYCENCASLQNAEKTMQITEEPEYLILTLLRFSYDQKYHVRRKILDNVSLPLVLELPVKRITSFSSLSESWSVDVDFTDLSENLAKKLKPSGTDEASCTKLVPYLLSSVVVHSGISSESGHYYSYARNITSTDSSYQMYHQSEALALASSQSHLLGRDSPSAVFEQDLENKEMSKEWFLFNDSRVTFTSFQSVQKITSRFPKDTAYVLLYKKQHSTNGLSGNNPTSGLWINGDPPLQKELMDAITKDNKLYLQEQELNARARALQAASASCSFRPNGFDDNDPPGSCGPTGGGGGGGFNTVGRLVF

SEQ ID NO: 13 - protein, 1123 aa, Homo sapiens
MDLGPGDAAGGGPLAPRPRRRRSLRRLFSRFLLALGSRSRPGDSPPRPQPGHCDGDGEGGFACAPGPVPAAPGSPGEERPPGPQPQLQLPAGDGARPPGAQGLKNHGNTCFMNAVVQCLSNTDLLAEFLALGRYRAAPGRAEVTEQLAALVRALWTREYTPQLSAEFKNAVSKYGSQFQGNSQHDALEFLLWLLDRVHEDLEGSSRGPVSEKLPPEATKTSENCLSPSAQLPLGQSFVQSHFQAQYRSSLTCPHCLKQSNTFDPFLCVSLPIPLRQTRFLSVTLVFPSKSQRFLRVGLAVPILSTVAALRKMVAEEGGVPADEVILVELYPSGFQRSFFDEEDLNTIAEGDNVYAFQVPPSPSQGTLSAHPLGLSASPRLAAREGQRFSLSLHSESKVLILFCNLVGSGQQASRFGPPFLIREDRAVSWAQLQQSILSKVRHLMKSEAPVQNLGSLFSIRVVGLSVACSYLSPKDSRPLCHWAVDRVLHLRRPGGPPHVKLAVEWDSSVKERLFGSLQEERAQDADSVWQQQQAHQQHSCTLDECFQFYTKEEQLAQDDAWKCPHCQVLQQGMVKLSLWTLPDILIIHLKRFCQVGERRNKLSTLVKFPLSGLNMAPHVAQRSTSPEAGLGPWPSWKQPDCLPTSYPLDFLYDLYAVCNHHGNLQGGHYTAYCRNSLDGQWYSYDDSTVEPLREDEVNTRGAYILFYQKRNSIPPWSASSSMRGSTSSSLSDHWLLRLGSHAGSTRGSLLSWSSAPCPSLPQVPDSPIFTNSLCNQEKGGLEPRRLVRGVKGRSISMKAPTTSRAKQGPFKTMPLRWSFGSKEKPPGASVELVEYLESRRRPRSTSQSIVSLLTGTAGEDEKSASPRSNVALPANSEDGGRAIERGPAGVPCPSAQPNHCLAPGNSDGPNTARKLKENAGQDIKLPRKFDLPLTVMPSVEHEKPARPEGQKAMNWKESFQMGSKSSPPSPYMGFSGNSKDSRRGTSELDRPLQGTLTLLRSVFRKKENRRNERAEVSPQVPPVSLVSGGLSPAMDGQAPGSPPALRIPEGLARGLGSRLERDVWSAPSSLRLPRKASRAPRGSALGMSQRTVPGEQASYGTFQRVKYHTLSLGRKKTLPESSF

SEQ ID NO: 14 - protein, 605 aa, Homo sapiens
MSQLSSTLKRYTESARYTDAHYAKSGYGAYTPSSYGANLAASLLEKEKLGFKPVPTSSFLTRPRTYGPSSLLDYDRGRPLLRPDITGGGKRAESQTRGTERPLGSGLSGGSGFPYGVTNNCLSYLPINAYDQGVTLTQKLDSQSDLARDFSSLRTSDSYRIDPRNLGRSPMLARTRKELCTLQGLYQTASCPEYLVDYLENYGRKGSASQVPSQAPPSRVPEIISPTYRPIGRYTLWETGKGQAPGPSRSSSPGRDGMNSKSAQGLAGLRNLGNTCFMNSILQCLSNTRELRDYCLQRLYMRDLHHGSNAHTALVEEFAKLIQTIWTSSPNDVVSPSEFKTQIQRYAPRFVGYNQQDAQEFLRFLLDGLHNEVNRVTLRPKSNPENLDHLPDDEKGRQMWRKYLEREDSRIGDLFVGQLKSSLTCTDCGYCSTVFDPFWDLSLPIAKRGYPEVTLMDCMRLFTKEDVLDGDEKPTCCRCRGRKRCIKKFSIQRFPKILVLHLKRFSESRIRTSKLTTFVNFPLRDLDLREFASENTNHAVYNLYAVSNHSGTTMGGHYTAYCRSPGTGEWHTFNDSSVTPMSSSQVRTSDAYLLFYELASPPSRM

SEQ ID NO: 15 - protein, 814 aa, Homo sapiens
MRVKDPTKALPEKAKRSKRPTVPHDEDSSDDIAVGLTCQHVSHAISVNHVKRAIAENLWSVCSECLKERRFYDGQLVLTSDIWLCLKCGFQGCGKNSESQHSLKHFKSSRTEPHCIIINLSTWIIWCYECDEKLSTHCNKKVLAQIVDFLQKHASKTQTSAFSRIMKLCEEKCETDEIQKGGKCRNLSVRGITNLGNTCFFNAVMQNLAQTYTLTDLMNEIKESSTKLKIFPSSDSQLDPLVVELSRPGPLTSALFLFLHSMKETEKGPLSPKVLFNQLCQKAPRFKDFQQQDSQELLHYLLDAVRTEETKRIQASILKAFNNPTTKTADDETRKKVKAYGKEGVKMNFIDRIFIGELTSTVMCEECANISTVKDPFIDISLPIIEERVSKPLLWGRMNKYRSLRETDHDRYSGNVTIENIHQPRAAKKHSSSKDKSQLIHDRKCIRKLSSGETVTYQKNENLEMNGDSLMFASLMNSESRLNESPTDDSEKEASHSESNVDADSEPSESESASKQTGLFRSSSGSGVQPDGPLYPLSAGKLLYTKETDSGDKEMAEAISELRLSSTVTGDQDFDRENQPLNISNNLCFLEGKHLRSYSPQNAFQTLSQSYITTSKECSIQSCLYQFTSMELLMGNNKLLCENCTKNKQKYQEETSFAEKKVEGVYTNARKQLLISAVPAVLILHLKRFHQAGLSLRKVNRHVDFPLMLDLAPFCSATCKNASVGDKVLYGLYGIVEHSGSMREGHYTAYVKVRTPSRKLSEHNTKKKNVPGLKAADNESAGQWVHVSDTYLQVVPESRALSAQAYLLFYERVL

SEQ ID NO: 16 - protein, 1604 aa, Homo sapiens
MGAKESRIGFLSYEEALRRVTDVELKRLKDAFKRTCGLSYYMGQHCFIREVLGDGVPPKVAEVIYCSFGGTSKGLHFNNLIVGLVLLTRGKDEEKAKYIFSLFSSESGNYVIREEMERMLHVVDGKVPDTLRKCFSEGEKVNYEKFRNWLFLNKDAFTFSRWLLSGGVYVTLTDDSDTPTFYQTLAGVTHLEESDIIDLEKRYWLLKAQSRTGRFDLETFGPLVSPPIRPSLSEGLFNAFDENRDNHIDFKEISCGLSACCRGPLAERQKFCFKVFDVDRDGVLSRVELRDMVVALLEVWKDNRTDDIPELHMDLSDIVEGILNAHDTTKMGHLTLEDYQIWSVKNVLANEFLNLLFQVCHIVLGLRPATPEEEGQIIRGWLERESRYGLQAGHNWFIISMQWWQQWKEYVKYDANPVVIEPSSVLNGGKYSFGTAAHPMEQVEDRIGSSLSYVNTTEEKFSDNISTASEASETAGSGFLYSATPGADVCFARQHNTSDNNNQCLLGANGNILLHLNPQKPGAIDNQPLVTQEPVKATSLTLEGGRLKRTPQLIHGRDYEMVPEPVWRALYHWYGANLALPRPVIKNSKTDIPELELFPRYLLFLRQQPATRTQQSNIWVNMGNVPSPNAPLKRVLAYTGCFSRMQTIKEIHEYLSQRLRIKEEDMRLWLYNSENYLTLLDDEDHKLEYLKIQDEQHLVIEVRNKDMSWPEEMSFIANSSKIDRHKVPTEKGATGLSNLGNTCFMNSSIQCVSNTQPLTQYFISGRHLYELNRTNPIGMKGHMAKCYGDLVQELWSGTQKNVAPLKLRWTIAKYAPRFNGFQQQDSQELLAFLLDGLHEDLNRVHEKPYVELKDSDGRPDWEVAAEAWDNHLRRNRSIVVDLFHGQLRSQVKCKTCGHISVRFDPFNFLSLPLPMDSYMHLEITVIKLDGTTPVRYGLRLNMDEKYTGLKKQLSDLCGLNSEQILLAEVHGSNIKNFPQDNQKVRLSVSGFLCAFEIPVPVSPISASSPTQTDFSSSPSTNEMFTLTTNGDLPRPIFIPNGMPNTVVPCGTEKNFTNGMVNGHMPSLPDSPFTGYIIAVHRKMMRTELYFLSSQKNRPSLFGMPLIVPCTVHTRKKDLYDAVWIQVSRLASPLPPQEASNHAQDCDDSMGYQYPFTLRVVQKDGNSCAWCPWYRFCRGCKIDCGEDRAFIGNAYIAVDWDPTALHLRYQTSQERVVDEHESVEQSRRAQAEPINLDSCLRAFTSEEELGENEMYYCSKCKTHCLATKKLDLWRLPPILIIHLKRFQFVNGRWIKSQKIVKFPRESFDPSAFLVPRDPALCQHKPLTPQGDELSEPRILAREVKKVDAQSSAGEEDVLLSKSPSSLSANIISSPKGSPSSSRKSGTSCPSSKNSSPNSSPRTLGRSKGRLRLPQIGSKNKLSSSKENLDASKENGAGQICELADALSRGHVLGGSQPELVTPQDHEVALANGFLYEHEACGNGYSNGQLGNHSEEDSTDDQREDTRIKPIYNLYAISCHSGILGGGHYVTYAKNPNCKWYCYNDSSCKELHPDEIDTDSAYILFYEQQGIDYAQFLPKTDGKKMADTSSMDEDFESDYKKYCVLQ

SEQ ID NO: 17 - protein, 398 aa, Homo sapiens
MEDDSLYLRGEWQFNHFSKLTSSRPDAAFAEIQRTSLPEKSPLSCETRVDLCDDLAPVARQLAPREKLPLSSRRPAAVGAGLQNMGNTCYVNASLQCLTYTPPLANYMLSREHSQTCHRHKGCMLCTMQAHITRALHNPGHVIQPSQALAAGFHRGKQEDAHEFLMFTVDAMKKACLPGHKQVDHHSKDTTLIHQIFGGYWRSQIKCLHCHGISDTFDPYLDIALDIQAAQSVQQALEQLVKPEELNGENAYHCGVCLQRAPASKTLTLHTSAKVLILVLKRFSDVTGNKIAKNVQYPECLDMQPYMSQQNTGPLVYVLYAVLVHAGWSCHNGHYFSYVKAQEGQWYKMDDAEVTASSITSVLSQQAYVLFYIQKSEWERHSESVSRGREPRALGSED

SEQ ID NO: 18 - protein, 1324 aa, Homo sapiens
MTIVDKASESSDPSAYQNQPGSSEAVSPGDMDAGSASWGAVSSLNDVSNHTLSLGPVPGAVVYSSSSVPDKSKPSPQKDQALGDGIAPPQKVLFPSEKICLKWQQTHRVGAGLQNLGNTCFANAALQCLTYTPPLANYMLSHEHSKTCHAEGFCMMCTMQAHITQALSNPGDVIKPMFVINEMRRIARHFRFGNQEDAHEFLQYTVDAMQKACLNGSNKLDRHTQATTLVCQIFGGYLRSRVKCLNCKGVSDTFDPYLDITLEIKAAQSVNKALEQFVKPEQLDGENSYKCSKCKKMVPASKRFTIHRSSNVLTLSLKRFANFTGGKIAKDVKYPEYLDIRPYMSQPNGEPIVYVLYAVLVHTGFNCHAGHYFCYIKASNGLWYQMNDSIVSTSDIRSVLSQQAYVLFYIRSHDVKNGGELTHPTHSPGQSSPRPVISQRVVTNKQAAPGFIGPQLPSHMIKNPPHLNGTGPLKDTPSSSMSSPNGNSSVNRASPVNASASVQNWSVNRSSVIPEHPKKQKITISIHNKLPVRQCQSQPNLHSNSLENPTKPVPSSTITNSAVQSTSNASTMSVSSKVTKPIPRSESCSQPVMNGKSKLNSSVLVPYGAESSEDSDEESKGLGKENGIGTIVSSHSPGQDAEDEEATPHELQEPMTLNGANSADSDSDPKENGLAPDGASCQGQPALHSENPFAKANGLPGKLMPAPLLSLPEDKILETFRLSNKLKGSTDEMSAPGAERGPPEDRDAEPQPGSPAAESLEEPDAAAGLSSTKKAPPPRDPGTPATKEGAWEAMAVAPEEPPPSAGEDIVGDTAPPDLCDPGSLTGDASPLSQDAKGMIAEGPRDSALAEAPEGLSPAPPARSEEPCEQPLLVHPSGDHARDAQDPSQSLGAPEAAERPPAPVLDMAPAGHPEGDAEPSPGERVEDAAAPKAPGPSPAKEKIGSLRKVDRGHYRSRRERSSSGEPARESRSKTEGHRHRRRRTCPRERDRQDRHAPEHHPGHGDRLSPGERRSLGRCSHHHSRHRSGVELDWVRHHYTEGERGWGREKFYPDRPRWDRCRYYHDRYALYAARDWKPFHGGREHERAGLHERPHKDHNRGRRGCEPARERERHRPSSPRAGAPHALAPHPDRFSHDRTALVAGDNCNLSDRFHEHENGKSRKRRHDSVENSDSHVEKKARRSEQKDPLEEPKAKKHKKSKKKKKSKDKHRDRDSRHQQDSDLSAACSDADLHRHKKKKKKKKRHSRKSEDFVKDSELHLPRVTSLETVAQFRRAQGGFPLSGGPPLEGVGPFREKTKHLRMESRDDRCRLFEYGQGKRRYLELGR

SEQ ID NO: 19 - protein, 530 aa, Homo sapiens
MEDDSLYLGGDWQFNHFSKLTSSRLDAAFAEIQRTSLSEKSPLSSETRFDLCDDLAPVARQLAPREKLPLSSRRPAAVGAGLQKIGNTFYVNVSLQCLTYTLPLSNYMLSREDSQTCHLHKCCMFCTMQAHITWALHSPGHVIQPSQVLAAGFHRGEQEDAHEFLMFTVDAMKKACLPGHKQLDHHSKDTTLIHQIFGAYWRSQIKYLHCHGVSDTFDPYLDIALDIQAAQSVKQALEQLVKPKELNGENAYHCGLCLQKAPASKTLTLPTSAKVLILVLKRFSDVTGNKLAKNVQYPKCRDMQPYMSQQNTGPLVYVLYAVLVHAGWSCHNGHYFSYVKAQEGQWYKMDDAEVTASGITSVLSQQAYVLFYIQKSEWERHSESVSRGREPRALGAEDTDRPATQGELKRDHPCLQVPELDEHLVERATQESTLDHWKFPQEQNKTKPEFNVRKVEGTLPPNVLVIHQSKYKCGMKNHHPEQQSSLLNLSSTKPTDQESMNTGTLASLQGSTRRSKGNNKHSKRSLLVCQ

SEQ ID NO: 20 - protein, 530 aa, Homo sapiens
MEDDSLYLGGEWQFNHFSKLTSSRPDAAFAEIQRTSLPEKSPLSCETRVDLCDDLAPVARQLAPREKLPLSSRRPAAVGAGLQNMGNTCYVNASLQCLTYTPPLANYMLSREHSQTCHRHKGCMLCTMQAHITRALHNPGHVIQPSQALAAGFHRGKQEDAHEFLMFTVDAMKKACLPGHKQVDHHSKDTTLIHQIFGGYWRSQIKCLHCHGISDTFDPYLDIALDIQAAQSVQQALEQLVKPEELNGENAYHCGVCLQRAPASKTLTLHTSAKVLILVLKRFSDVTGNKIAKNVQYPECLDMQPYMSQQNTGPLVYVLYAVLVHAGWSCHNGHYFSYVKAQEGQWYKMDDAEVTAASITSVLSQQAYVLFYIQKSEWERHSESVSRGREPRALGAEDTDRRATQGELKRDHPCLQAPELDEHLVERATQESTLDHWKFLQEQNKTKPEFNVRKVEGTLPPDVLVIHQSKYKCGMKNHHPEQQSSLLNLSSSTPTHQESMNTGTLASLRGRARRSKGKNKHSKRALLVCQ

SEQ ID NO: 21 - protein, 863 aa, Homo sapiens
MQRRGALFGMPGGSGGRKMAAGDIGELLVPHMPTIRVPRSGDRVYKNECAFSYDSPNSEGGLYVCMNTFLAFGREHVERHFRKTGQSVYMHLKRHVREKVRGASGGALPKRRNSKIFLDLDTDDDLNSDDYEYEDEAKLVIFPDHYEIALPNIEELPALVTIACDAVLSSKSPYRKQDPDTWENELPVSKYANNLTQLDNGVRIPPSGWKCARCDLRENLWLNLTDGSVLCGKWFFDSSGGNGHALEHYRDMGYPLAVKLGTITPDGADVYSFQEEEPVLDPHLAKHLAHFGIDMLHMHGTENGLQDNDIKLRVSEWEVIQESGTKLKPMYGPGYTGLKNLGNSCYLSSVMQAIFSIPEFQRAYVGNLPRIFDYSPLDPTQDFNTQMTKLGHGLLSGQYSKPPVKSELIEQVMKEEHKPQQNGISPRMFKAFVSKSHPEFSSNRQQDAQEFFLHLVNLVERNRIGSENPSDVFRFLVEERIQCCQTRKVRYTERVDYLMQLPVAMEAATNKDELIAYELTRREAEANRRPLPELVRAKIPFSACLQAFSEPENVDDFWSSALQAKSAGVKTSRFASFPEYLVVQIKKFTFGLDWVPKKFDVSIDMPDLLDINHLRARGLQPGEEELPDISPPIVIPDDSKDRLMNQLIDPSDIDESSVMQLAEMGFPLEACRKAVYFTGNMGAEVAFNWIIVHMEEPDFAEPLTMPGYGGAASAGASVFGASGLDNQPPEEIVAIITSMGFQRNQAIQALRATNNNLERALDWIFSHPEFEEDSDFVIEMENNANANIISEAKPEGPRVKDGSGTYELFAFISHMGTSTMSGHYICHIKKEGRWVIYNDHKVCASERPPKDLGYMYFYRRIPS

SEQ ID NO: 22 - protein, 963 aa, Homo sapiens
MAVAPRLFGGLCFRFRDQNPEVAVEGRLPISHSCVGCRRERTAMATVAANPAAAAAAVAAAAAVTEDREPQHEELPGLDSQWRQIENGESGRERPLRAGESWFLVEKHWYKQWEAYVQGGDQDSSTFPGCINNATLFQDEINWRLKEGLVEGEDYVLLPAAAWHYLVSWYGLEHGQPPIERKVIELPNIQKVEVYPVELLLVRHNDLGKSHTVQFSHTDSIGLVLRTARERFLVEPQEDTRLWAKNSEGSLDRLYDTHITVLDAALETGQLIIMETRKKDGTWPSAQLHVMNNNMSEEDEDFKGQPGICGLTNLGNTCFMNSALQCLSNVPQLTEYFLNNCYLEELNFRNPLGMKGEIAEAYADLVKQAWSGHHRSIVPHVFKNKVGHFASQFLGYQQHDSQELLSFLLDGLHEDLNRVKKKEYVELCDAAGRPDQEVAQEAWQNHKRRNDSVIVDTFHGLFKSTLVCPDCGNVSVTFDPFCYLSVPLPISHKRVLEVFFIPMDPRRKPEQHRLVVPKKGKISDLCVALSKHTGISPERMMVADVFSHRFYKLYQLEEPLSSILDRDDIFVYEVSGRIEAIEGSREDIVVPVYLRERTPARDYNNSYYGLMLFGHPLLVSVPRDRFTWEGLYNVLMYRLSRYVTKPNSDDEDDGDEKEDDEEDKDDVPGPSTGGSLRDPEPEQAGPSSGVTNRCPFLLDNCLGTSQWPPRRRRKQLFTLQTVNSNGTSDRTTSPEEVHAQPYIAIDWEPEMKKRYYDEVEAEGYVKHDCVGYVMKKAPVRLQECIELFTTVETLEKENPWYCPSCKQHQLATKKLDLWMLPEILIIHLKRFSYTKFSREKLDTLVEFPIRDLDFSEFVIQPQNESNPELYKYDLIAVSNHYGGMRDGHYTTFACNKDSGQWHYFDDNSVSPVNENQIESKAAYVLFYQRQDVARRLLSPAGSSGAPASPACSSPPSSEFMDVN

SEQ ID NO: 23 - protein, 530 aa, Homo sapiens
MGDDSLYLGGEWQFNHFSKLTSSRPDAAFAEIQRTSLPEKSPLSSETRVDLCDDLAPVARQLAPREKLPLSSRRPAAVGAGLQNMGNTCYENASLQCLTYTLPLANYMLSREHSQTCQRPKCCMLCTMQAHITWALHSPGHVIQPSQALAAGFHRGKQEDVHEFLMFTVDAMKKACLPGHKQVDHHCKDTTLIHQIFGGCWRSQIKCLHCHGISDTFDPYLDIALDIQAAQSVKQALEQLVKPEELNGENAYHCGLCLQRAPASNTLTLHTSAKVLILVLKRFSDVAGNKLAKNVQYPECLDMQPYMSQQNTGPLVYVLYAVLVHAGWSCHDGHYFSYVKAQEVQWYKMDDAEVTVCSIISVLSQQAYVLFYIQKSEWERHSESVSRGREPRALGAEDTDRRAKQGELKRDHPCLQAPELDEHLVERATQESTLDHWKFLQEQNKTKPEFNVGKVEGTLPPNALVIHQSKYKCGMKNHHPEQQSSLLNLSSTTRTDQESMNTGTLASLQGRTRRAKGKNKHSKRALLVCQ

SEQ ID NO: 24 - protein, 494 aa, Homo sapiens
MPLYSVTVKWGKEKFEGVELNTDEPPMVFKAQLFALTGVQPARQKVMVKGGTLKDDDWGNIKIKNGMTLLMMGSADALPEEPSAKTVFVEDMTEEQLASAMELPCGLTNLGNTCYMNATVQCIRSVPELKDALKRYAGALRASGEMASAQYITAALRDLFDSMDKTSSSIPPIILLQFLHMAFPQFAEKGEQGQYLQQDANECWIQMMRVLQQKLEAIEDDSVKETDSSSASAATPSKKKSLIDQFFGVEFETTMKCTESEEEEVTKGKENQLQLSCFINQEVKYLFTGLKLRLQEEITKQSPTLQRNALYIKSSKISRLPAYLTIQMVRFFYKEKESVNAKVLKDVKFPLMLDMYELCTPELQEKMVSFRSKFKDLEDKKVNQQPNTSDKKSSPQKEVKYEPFSFADDIGSNNCGYYDLQAVLTHQGRSSSSGHYVSWVKRKQDEWIKFDDDKVSIVTPEDILRLSGGGDWHIAYVLLYGPRRVEIMEEESEQ

SEQ ID NO: 25 - protein, 963 aa, Homo sapiens
MAEGGGCRERPDAETQKSELGPLMRTTLQRGAQWYLIDSRWFKQWKKYVGFDSWDMYNVGEHNLFPGPIDNSGLFSDPESQTLKEHLIDELDYVLVPTEAWNKLLNWYGCVEGQQPIVRKVVEHGLFVKHCKVEVYLLELKLCENSDPTNVLSCHFSKADTIATIEKEMRKLFNIPAERETRLWNKYMSNTYEQLSKLDNTVQDAGLYQGQVLVIEPQNEDGTWPRQTLQSKSSTAPSRNFTTSPKSSASPYSSVSASLIANGDSTSTCGMHSSGVSRGGSGFSASYNCQEPPSSHIQPGLCGLGNLGNTCFMNSALQCLSNTAPLTDYFLKDEYEAEINRDNPLGMKGEIAEAYAELIKQMWSGRDAHVAPRMFKTQVGRFAPQFSGYQQQDSQELLAFLLDGLHEDLNRVKKKPYLELKDANGRPDAVVAKEAWENHRLRNDSVIVDTFHGLFKSTLVCPECAKVSVTFDPFCYLTLPLPLKKDRVMEVFLVPADPHCRPTQYRVTVPLMGAVSDLCEALSRLSGIAAENMVVADVYNHRFHKIFQMDEGLNHIMPRDDIFVYEVCSTSVDGSECVTLPVYFRERKSRPSSTSSASALYGQPLLLSVPKHKLTLESLYQAVCDRISRYVKQPLPDEFGSSPLEPGACNGSRNSCEGEDEEEMEHQEEGKEQLSETEGSGEDEPGNDPSETTQKKIKGQPCPKRLFTFSLVNSYGTADINSLAADGKLLKLNSRSTLAMDWDSETRRLYYDEQESEAYEKHVSMLQPQKKKKTTVALRDCIELFTTMETLGEHDPWYCPNCKKHQQATKKFDLWSLPKILVVHLKRFSYNRYWRDKLDTVVEFPIRGLNMSEFVCNLSARPYVYDLIAVSNHYGAMGVGHYTAYAKNKLNGKWYYFDDSNVSLASEDQIVTKAAYVLFYQRRDDEFYKTPSLSSSGSSDGGTRPSSSQQGFGDDEACSMDTN

SEQ ID NO: 26 - protein, 913 aa, Homo sapiens
MAALFLRGFVQIGNCKTGISKSKEAFIEAVERKKKDRLVLYFKSGKYSTFRLSDNIQNVVLKSYRGNQNHLHLTLQNNNGLFIEGLSSTDAEQLKIFLDRVHQNEVQPPVRPGKGGSVFSSTTQKEINKTSFHKVDEKSSSKSFEIAKGSGTGVLQRMPLLTSKLTLTCGELSENQHKKRKRMLSSSSEMNEEFLKENNSVEYKKSKADCSRCVSYNREKQLKLKELEENKKLECESSCIMNATGNPYLDDIGLLQALTEKMVLVFLLQQGYSDGYTKWDKLKLFFELFPEKICHGLPNLGNTCYMNAVLQSLLSIPSFADDLLNQSFPWGKIPLNALTMCLARLLFFKDTYNIEIKEMLLLNLKKAISAAAEIFHGNAQNDAHEFLAHCLDQLKDNMEKLNTIWKPKSEFGEDNFPKQVFADDPDTSGFSCPVITNFELELLHSIACKACGQVILKTELNNYLSINLPQRIKAHPSSIQSTFDLFFGAEELEYKCAKCEHKTSVGVHSFSRLPRILIVHLKRYSLNEFCALKKNDQEVIISKYLKVSSHCNEGTRPPLPLSEDGEITDFQLLKVIRKMTSGNISVSWPATKESKDILAPHIGSDKESEQKKGQTVFKGASRRQQQKYLGKNSKPNELESVYSGDRAFIEKEPLAHLMTYLEDTSLCQFHKAGGKPASSPGTPLSKVDFQTVPENPKRKKYVKTSKFVAFDRIINPTKDLYEDKNIRIPERFQKVSEQTQQCDGMRICEQAPQQALPQSFPKPGTQGHTKNLLRPTKLNLQKSNRNSLLALGSNKNPRNKDILDKIKSKAKETKRNDDKGDHTYRLISVVSHLGKTLKSGHYICDAYDFEKQIWFTYDDMRVLGIQEAQMQEDRRCTGYIFFYMHNEIFEEMLKREENAQLNSKEVEETLQKE

SEQ ID NO: 27 - protein, 1318 aa, Homo sapiens
MSGGASATGPRRGPPGLEDTTSKKKQKDRANQESKDGDPRKETGSRYVAQAGLEPLASGDPSASASHAAGITGSRHRTRLFFPSSSGSASTPQEEQTKEGACEDPHDLLATPTPELLLDWRQSAEEVIVKLRVGVGPLQLEDVDAAFTDTDCVVRFAGGQQWGGVFYAEIKSSCAKVQTRKGSLLHLTLPKKVPMLTWPSLLVEADEQLCIPPLNSQTCLLGSEENLAPLAGEKAVPPGNDPVSPAMVRSRNPGKDDCAKEEMAVAADAATLVDEPESMVNLAFVKNDSYEKGPDSVVVHVYVKEICRDTSRVLFREQDFTLIFQTRDGNFLRLHPGCGPHTTFRWQVKLRNLIEPEQCTFCFTASRIDICLRKRQSQRWGGLEAPAARVGGAKVAVPTGPTPLDSTPPGGAPHPLTGQEEARAVEKDKSKARSEDTGLDSVATRTPMEHVTPKPETHLASPKPTCMVPPMPHSPVSGDSVEEEEEEEKKVCLPGFTGLVNLGNTCFMNSVIQSLSNTRELRDFFHDRSFEAEINYNNPLGTGGRLAIGFAVLLRALWKGTHHAFQPSKLKAIVASKASQFTGYAQHDAQEFMAFLLDGLHEDLNRIQNKPYTETVDSDGRPDEVVAEEAWQRHKMRNDSFIVDLFQGQYKSKLVCPVCAKVSITFDPFLYLPVPLPQKQKVLPVFYFAREPHSKPIKFLVSVSKENSTASEVLDSLSQSVHVKPENLRLAEVIKNRFHRVFLPSHSLDTVSPSDTLLCFELLSSELAKERVVVLEVQQRPQVPSVPISKCAACQRKQQSEDEKLKRCTRCYRVGYCNQLCQKTHWPDHKGLCRPENIGYPFLVSVPASRLTYARLAQLLEGYARYSVSVFQPPFQPGRMALESQSPGCTTLLSTGSLEAGDSERDPIQPPELQLVTPMAEGDTGLPRVWAAPDRGPVPSTSGISSEMLASGPIEVGSLPAGERVSRPEAAVPGYQHPSEAMNAHTPQFFIYKIDSSNREQRLEDKGDTPLELGDDCSLALVWRNNERLQEFVLVASKELECAEDPGSAGEAARAGHFTLDQCLNLFTRPEVLAPEEAWYCPQCKQHREASKQLLLWRLPNVLIVQLKRFSFRSFIWRDKINDLVEFPVRNLDLSKFCIGQKEEQLPSYDLYAVINHYGGMIGGHYTACARLPNDRSSQRSDVGWRLFDDSTVTTVDESQVVTRYAYVLFYRRRNSPVERPPRAGHSEHHPDLGPAAEAAASQASRIWQELEAEEEPVPEGSGPLGPWGPQDWVGPLPRGPTTPDEGCLRYFVLGTVAALVALVLNVFYPLVSQSRWR

SEQ ID NO: 28 - protein, 798 aa, Homo sapiens
MALHSPQYIFGDFSPDEFNQFFVTPRSSVELPPYSGTVLCGTQAVDKLPDGQEYQRIEFGVDEVIEPSDTLPRTPSYSISSTLNPQAPEFILGCTASKITPDGITKEASYGSIDCQYPGSALALDGSSNVEAEVLENDGVSGGLGQRERKKKKKRPPGYYSYLKDGGDDSISTEALVNGHANSAVPNSVSAEDAEFMGDMPPSVTPRTCNSPQNSTDSVSDIVPDSPFPGALGSDTRTAGQPEGGPGADFGQSCFPAEAGRDTLSRTAGAQPCVGTDTTENLGVANGQILESSGEGTATNGVELHTTESIDLDPTKPESASPPADGTGSASGTLPVSQPKSWASLFHDSKPSSSSPVAYVETKYSPPAISPLVSEKQVEVKEGLVPVSEDPVAIKIAELLENVTLIHKPVSLQPRGLINKGNWCYINATLQALVACPPMYHLMKFIPLYSKVQRPCTSTPMIDSFVRLMNEFTNMPVPPKPRQALGDKIVRDIRPGAAFEPTYIYRLLTVNKSSLSEKGRQEDAEEYLGFILNGLHEEMLNLKKLLSPSNEKLTISNGPKNHSVNEEEQEEQGEGSEDEWEQVGPRNKTSVTRQADFVQTPITGIFGGHIRSVVYQQSSKESATLQPFFTLQLDIQSDKIRTVQDALESLVARESVQGYTTKTKQEVEISRRVTLEKLPPVLVLHLKRFVYEKTGGCQKLIKNIEYPVDLEISKELLSPGVKNKNFKCHRTYRLFAVVYHHGNSATGGHYTTDVFQIGLNGWLRIDDQTVKVINQYQVVKPTAERTAYLLYYRRVDLL

SEQ ID NO: 29 - protein, 688 aa, Homo sapiens
MDRCKHVGRLRLAQDHSILNPQKWCCLECATTESVWACLKCSHVACGRYIEDHALKHFEETGHPLAMEVRDLYVFCYLCKDYVLNDNPEGDLKLLRSSLLAVRGQKQDTPVRRGRTLRSMASGEDVVLPQRAPQGQPQMLTALWYRRQRLLARTLRLWFEKSSRGQAKLEQRRQEEALERKKEEARRRRREVKRRLLEELASTPPRKSARLLLHTPRDAGPAASRPAALPTSRRVPAATLKLRRQPAMAPGVTGLRNLGNTCYMNSILQVLSHLQKFRECFLNLDPSKTEHLFPKATNGKTQLSGKPTNSSATELSLRNDRAEACEREGFCWNGRASISRSLELIQNKEPSSKHISLCRELHTLFRVMWSGKWALVSPFAMLHSVWSLIPAFRGYDQQDAQEFLCELLHKVQQELESEGTTRRILIPFSQRKLTKQVLKVVNTIFHGQLLSQVTCISCNYKSNTIEPFWDLSLEFPERYHCIEKGFVPLNQTECLLTEMLAKFTETEALEGRIYACDQCNSKRRKSNPKPLVLSEARKQLMIYRLPQVLRLHLKRFRWSGRNHREKIGVHVVFDQVLTMEPYCCRDMLSSLDKETFAYDLSAVVMHHGKGFGSGHYTAYCYNTEGGFWVHCNDSKLNVCSVEEVCKTQAYILFYTQRTVQGNARISETHLQAQVQSSNNDEGRPQTFS

SEQ ID NO: 30 - protein, 530 aa, Homo sapiens
MEDDSLYLGGEWQFNHFSKLTSPRPDAAFAEIQRTSLPEKSPLSSETRVDLCDDLAPVARQLAPREKLPLSSRRPAAVGAGLQNMGNTCYLNASLQCLTYTPPLANYMLSREHSQTCQRPKCCMLCTMQAHITWALHSPGHVIQPSQALAAGFHRGKQEDAHEFLMFTVDAMKKACLPGHKQVDHHSKDTTLIHQIFGGCWRSQIKCLHCHGISDTFDPYLDIALDIQAAQSVKQALEQLVKPEELNGENAYPCGLCLQRAPASNTLTLHTSAKVLILVLKRFCDVTGNKLAKNVQYPECLDMQPYMSQQNTGPLVYVLYAVLVHAGWSCHNGYYFSYVKAQEGQWYKMDDAEVTACSITSVLSQQAYVLFYIQKSEWERHSESVSRGREPRALGAEDTDRPATQGELKRDHPCLQVPELDEHLVERATEESTLDHWKFPQEQNKMKPEFNVRKVEGTLPPNVLVIHQSKYKCGMKNHHPEQQSSLLNLSSMNSTDQESMNTGTLASLQGRTRRSKGKNKHSKRSLLVCQ

SEQ ID NO: 31 - protein, 350 aa, Homo sapiens
GSKKHTGYVGLKNQGATCYMNSLLQTLFFTNQLRKAVYMMPTEGDDSSKSVPLALQRVFYELQHSDKPVGTKKLTKSFGWETLDSFMQHDVQELCRVLLDNVENKMKGTCVEGTIPKLFRGKMVSYIQCKEVDYRSDRREDYYDIQLSIKGKKNIFESFVDYVAVEQLDGDNKYDAGEHGLQEAEKGVKFLTLPPVLHLQLMRFMYDPQTDQNIKINDRFEFPEQLPLDEFLQKTDPKDPANYILHAVLVHSGDNHGGHYVVYLNPKGDGKWCKFDDDVVSRCTKEEAIEHNYGGHDDDLSVRHCTNAYMLVYIRESKLSEVLQAVTDHDIPQQLVERLQEEKRIEAQKR

SEQ ID NO: 32 - protein, 343 aa, Homo sapiens
AQGLAGLRNLGNTCFMNSILQCLSNTRELRDYCLQRLYMRDLHHGSNAHTALVEEFAKLIQTIWTSSPNDVVSPSEFKTQIQRYAPRFVGYNQQDAQEFLRFLLDGLHNEVNRVTLRPKSNPENLDHLPDDEKGRQMWRKYLEREDSRIGDLFVGQLKSSLTCTDCGYCSTVFDPFWDLSLPIAKRGYPEVTLMDCMRLFTKEDVLDGDEKPTCCRCRGRKRCIKKFSIQRFPKILVLHLKRFSESRIRTSKLTTFVNFPLRDLDLREFASENTNHAVYNLYAVSNHSGTTMGGHYTAYCRSPGTGEWHTFNDSSVTPMSSSQVRTSDAYLLFYELASPPSRM

SEQ ID NO: 33 - protein, 374 aa, Homo sapiens
GLEIMIGKKKGIQGHYNSCYLDSTLFCLFAFSSVLDTVLLRPKEKNDVEYYSETQELLRTEIVNPLRIYGYVCATKIMKLRKILEKVEAASGFTSEEKDPEEFLNILFHHILRVEPLLKIRSAGQKVQDCYFYQIFMEKNEKVGVPTIQQLLEWSFINSNLKFAEAPSCLIIQMPRFGKDFKLFKKIFPSLELNITDLLEDTPRQCRICGGLAMYECRECYDDPDISAGKIKQFCKTCNTQVHLHPKRLNHKYNPVSLPKDLPDWDWRHGCIPCQNMELFAVLCIETSHYVAFVKYGKDDSAWLFFDSMADRDGGQNGFNIPQVTPCPEVGEYLKMSLEDLHSLDSRRIQGCARRLLCDAYMCMYQSPTMSLYK

SEQ ID NO: 34 - protein, 530 aa, Homo sapiens
MEDDSLYLGGEWQFNHFSKLTSSRPDAAFAEIQRTSLPEKSPLSCETRVDLCDDLAPVARQLAPREKLPLSSRRPAAVGAGLQNMGNTCYVNASLQCLTYTPPLANYMLSREHSQTCHRHKGCMLCTMQAHITRALHNPGHVIQPSQALAAGFHRGKQEDAHEFLMFTVDAMKKACLPGHKQVDHHSKDTTLIHQIFGGYWRSQIKCLHCHGISDTFDPYLDIALDIQAAQSVQQALEQLVKPEELNGENAYHCGVCLQRAPASKTLTLHTSAKVLILVLKRFSDVTGNKIAKNVQYPECLDMQPYMSQTNTGPLVYVLYAVLVHAGWSCHNGHYFSYVKAQEGQWYKMDDAEVTASSITSVLSQQAYVLFYIQKSEWERHSESVSRGREPRALGAEDTDRRAKQGELKRDHPCLQAPELDEHLVERATQESTLDHWKFLQEQNKTKPEFNVRKVEGTLPPDVLVIHQSKYKCGMKNHHPEQQSSLLNLSSTTPTHQESMNTGTLASLRGRARRSKGKNKHSKRALLVCQ

SEQ ID NO: 35 - protein, 525 aa, Homo sapiens
MVSRPEPEGEAMDAELAVAPPGCSHLGSFKVDNWKQNLRAIYQCFVWSGTAEARKRKAKSCICHVCGVHLNRLHSCLYCVFFGCFTKKHIHEHAKAKRHNLAIDLMYGGIYCFLCQDYIYDKDMEIIAKEEQRKAWKMQGVGEKFSTWEPTKRELELLKHNPKRRKITSNCTIGLRGLINLGNTCFMNCIVQALTHTPLLRDFFLSDRHRCEMQSPSSCLVCEMSSLFQEFYSGHRSPHIPYKLLHLVWTHARHLAGYEQQDAHEFLIAALDVLHRHCKGDDNGKKANNPNHCNCIIDQIFTGGLQSDVTCQVCHGVSTTIDPFWDISLDLPGSSTPFWPLSPGSEGNVVNGESHVSGTTTLTDCLRRFTRPEHLGSSAKIKCSGCHSYQESTKQLTMKKLPIVACFHLKRFEHSAKLRRKITTYVSFPLELDMTPFMASSKESRMNGQYQQPTDSLNNDNKYSLFAVVNHQGTLESGHYTSFIRQHKDQWFKCDDAIITKASIKDVLDSEGYLLFYHKQFLEYE

SEQ ID NO: 36 - protein, 372 aa, Homo sapiens
MSKAFGLLRQICQSILAESSQSPADLEEKKEEDSNMKREQPRERPRAWDYPHGLVGLHNIGQTCCLNSLIQVFVMNVDFTRILKRITVPRGADEQRRSVPFQMLLLLEKMQDSRQKAVRPLELAYCLQKCNVPLFVQHDAAQLYLKLWNLIKDQITDVHLVERLQALYTIRVKDSLICVDCAMESSRNSSMLTLPLSLFDVDSKPLKTLEDALHCFFQPRELSSKSKCFCENCGKKTRGKQVLKLTHLPQTLTIHLMRFSIRNSQTRKICHSLYFPQSLDFSQILPMKRESCDAEEQSGGQYELFAVIAHVGMADSGHYCVYIRNAVDGKWFCFNDSNICLVSWEDIQCTYGNPNYHWQETAYLLVYMKMEC

SEQ ID NO: 37 - protein, 1077 aa, Homo sapiens
MTAELQQDDAAGAADGHGSSCQMLLNQLREITGIQDPSFLHEALKASNGDITQAVSLLTDERVKEPSQDTVATEPSEVEGSAANKEVLAKVIDLTHDNKDDLQAAIALSLLESPKIQADGRDLNRMHEATSAETKRSKRKRCEVWGENPNPNDWRRVDGWPVGLKNVGNTCWFSAVIQSLFQLPEFRRLVLSYSLPQNVLENCRSHTEKRNIMFMQELQYLFALMMGSNRKFVDPSAALDLLKGAFRSSEEQQQDVSEFTHKLLDWLEDAFQLAVNVNSPRNKSENPMVQLFYGTFLTEGVREGKPFCNNETFGQYPLQVNGYRNLDECLEGAMVEGDVELLPSDHSVKYGQERWFTKLPPVLTFELSRFEFNQSLGQPEKIHNKLEFPQIIYMDRYMYRSKELIRNKRECIRKLKEEIKILQQKLERYVKYGSGPARFPLPDMLKYVIEFASTKPASESCPPESDTHMTLPLSSVHCSVSDQTSKESTSTESSSQDVESTFSSPEDSLPKSKPLTSSRSSMEMPSQPAPRTVTDEEINFVKTCLQRWRSEIEQDIQDLKTCIASTTQTIEQMYCDPLLRQVPYRLHAVLVHEGQANAGHYWAYIYNQPRQSWLKYNDISVTESSWEEVERDSYGGLRNVSAYCLMYINDKLPYFNAEAAPTESDQMSEVEALSVELKHYIQEDNWRFEQEVEEWEEEQSCKIPQMESSTNSSSQDYSTSQEPSVASSHGVRCLSSEHAVIVKEQTAQAIANTARAYEKSGVEAALSEVMLSPAMQGVILAIAKARQTFDRDGSEAGLIKAFHEEYSRLYQLAKETPTSHSDPRLQHVLVYFFQNEAPKRVVERTLLEQFADKNLSYDERSISIMKVAQAKLKEIGPDDMNMEEYKKWHEDYSLFRKVSVYLLTGLELYQKGKYQEALSYLVYAYQSNAALLMKGPRRGVKESVIALYRRKCLLELNAKAASLFETNDDHSVTEGINVMNELIIPCIHLIINNDISKDDLDAIEVMRNHWCSYLGQDIAENLQLCLGEFLPRLLDPSAEIIVLKEPPTIRPNSPYDLCSRFAAVMESIQGVSTVTVK

SEQ ID NO: 38 - protein, 530 aa, Homo sapiens
MEDDSLYLGGEWQFNHFSKLTSSRPDAAFAEIQRTSLPEKSPLSSEARVDLCDDLAPVARQLAPRKKLPLSSRRPAAVGAGLQNMGNTCYENASLQCLTYTPPLANYMLSREHSQTCQRPKCCMLCTMQAHITWALHSPGHVIQPSQALAAGFHRGKQEDAHEFLMFTVDAMKKACLPGHKQVDHHSKDTTLIHQIFGGCWRSQIKCLHCHGISDTFDPYLDIALDIQAAQSVKQALEQLVKPEELNGENAYHCGLCLQRAPASKTLTLHTSAKVLILVLKRFSDVTGNKLAKNVQYPECLDMQPYMSQQNTGPLVYVLYAVLVHAGWSCHDGHYFSYVKAQEGQWYKMDDAKVTACSITSVLSQQAYVLFYIQKSEWERHSESVSRGREPRALGAEDTDRRATQGELKRDHPCLQAPELDERLVERATQESTLDHWKFPQEQNKTKPEFNVRKVEGTLPPNVLVIHQSKYKCGMKNHHPEQQSSLLNLSSTTRTDQESVNTGTLASLQGRTRRSKGKNKHSKRALLVCQ

SEQ ID NO: 39 - protein, 1352 aa, Homo sapiens
MSKVTAPGSGPPAAASGKEKRSFSKRLFRSGRAGGGGAGGPGASGPAAPSSPSSPSSARSVGSFMSRVLKTLSTLSHLSSEGAAPDRGGLRSCFPPGPAAAPTPPPCPPPPASPAPPACAAEPVPGVAGLRNHGNTCFMNATLQCLSNTELFAEYLALGQYRAGRPEPSPDPEQPAGRGAQGQGEVTEQLAHLVRALWTLEYTPQHSRDFKTIVSKNALQYRGNSQHDAQEFLLWLLDRVHEDLNHSVKQSGQPPLKPPSETDMMPEGPSFPVCSTFVQELFQAQYRSSLTCPHCQKQSNTFDPFLCISLPIPLPHTRPLYVTVVYQGKCSHCMRIGVAVPLSGTVARLREAVSMETKIPTDQIVLTEMYYDGFHRSFCDTDDLETVHESDCIFAFETPEIFRPEGILSQRGIHLNNNLNHLKFGLDYHRLSSPTQTAAKQGKMDSPTSRAGSDKIVLLVCNRACTGQQGKRFGLPFVLHLEKTIAWDLLQKEILEKMKYFLRPTVCIQVCPFSLRVVSVVGITYLLPQEEQPLCHPIVERALKSCGPGGTAHVKLVVEWDKETRDFLFVNTEDEYIPDAESVRLQRERHHQPQTCTLSQCFQLYTKEERLAPDDAWRCPHCKQLQQGSITLSLWTLPDVLIIHLKRFRQEGDRRMKLQNMVKFPLTGLDMTPHVVKRSQSSWSLPSHWSPWRRPYGLGRDPEDYIYDLYAVCNHHGTMQGGHYTAYCKNSVDGLWYCFDDSDVQQLSEDEVCTQTAYILFYQRRTAIPSWSANSSVAGSTSSSLCEHWVSRLPGSKPASVTSAASSRRTSLASLSESVEMTGERSEDDGGFSTRPFVRSVQRQSLSSRSSVTSPLAVNENCMRPSWSLSAKLQMRSNSPSRFSGDSPIHSSASTLEKIGEAADDKVSISCFGSLRNLSSSYQEPSDSHSRREHKAVGRAPLAVMEGVFKDESDTRRLNSSVVDTQSKHSAQGDRLPPLSGPFDNNNQIAYVDQSDSVDSSPVKEVKAPSHPGSLAKKPESTTKRSPSSKGTSEPEKSLRKGRPALASQESSLSSTSPSSPLPVKVSLKPSRSRSKADSSSRGSGRHSSPAPAQPKKESSPKSQDSVSSPSPQKQKSASALTYTASSTSAKKASGPATRSPFPPGKSRTSDHSLSREGSRQSLGSDRASATSTSKPNSPRVSQARAGEGRGAGKHVRSSSMASLRSPSTSIKSGLKRDSKSEDKGLSFFKSALRQKETRRSTDLGKTALLSKKAGGSSVKSVCKNTGDDEAERGHQPPASQQPNANTTGKEQLVTKDPASAKHSLLSARKSKSSQLDSGVPSSPGGRQSAEKSSKKLSSSMQTSARPSQKPQ

SEQ ID NO: 40 - protein, 530 aa, Homo sapiens
MEEDSLYLGGEWQFNHFSKLTSSRPDAAFAEIQRTSLPEKSPLSCETRVDLCDDLAPVARQLAPREKLPLSSRRPAAVGAGLQNMGNTCYVNASLQCLTYTPPLANYMLSREHSQTCHRHKGCMLCTMQAHITRALHNPGHVIQPSQALAAGFHRGKQEDAHEFLMFTVDAMKKACLPGHKQVDHHSKDTTLIHQIFGGYWRSQIKCLHCHGISDTFDPYLDIALDIQAAQSVQQALEQLVKPEELNGENAYHCGVCLQRAPASKTLTLHTSAKVLILVLKRFSDVTGNKIAKNVQYPECLDMQPYMSQTNTGPLVYVLYAVLVHAGWSCHNGHYFSYVKAQEGQWYKMDDAEVTASSITSVLSQQAYVLFYIQKSEWERHSESVSRGREPRALGAEDTDRRATQGELKRDHPCLQAPELDEHLVERATQESTLDHWKFLQEQNKTKPEFNVRKVEGTLPPDVLVIHQSKYKCGMKNHHPEQQSSLLKLSSTTPTHQESMNTGTLASLRGRARRSKGKNKHSKRALLVCQ

SEQ ID NO: 41 - protein, 553 aa, Homo sapiens
MEDDSLYLGGEWQFNHFSKLTSSRPDAAFAEIQRTSLPEKSPLSCETRVDLCDDLAPVARQLAPREKLPLSSRRPAAVGAGLQNMGNTCYVNASLQCLTYTPPLANYMLSREHSQTCHRHKGCMLCTMQAHITRALHNPGHVIQPSQALAAGFHRGKQEDAHEFLMFTVDAMKKACLPGHKQVDHHSKDTTLIHQIFGGYWRSQIKCLHCHGISDTFDPYLDIALDIQAAQSVQQALEQLVKPEELNGENAYHCGVCLQRAPASKTLTLHTSAKVLILVLKRFSDVTGNKIDKNVQYPECLDMKLYMSQTNSGPLVYVLYAVLVHAGWSCHNGHYFSYVKAQEGQWYKMDDAEVTASSITSVLSQQAYVLFYIQKSEWERHSESVSRGREPRALGAEDTDRRATQGELKRDHPCLQAPELDEHLVERATQESTLDHWKFLQEQNKTKPEFNVRKVEGTLPPDVLVIHQSKYKCGMKNHHPEQQSSLLNLSSTTPTHQESMNTGTLASLRGRARRSKGKNKHSKRALLVCQWSQWKYRPTRRGAHTHAHTQTHT

SEQ ID NO: 42 - protein, 1375 aa, Homo sapiens
MVPGEENQLVPKEDVFWRCRQNIFDEMKKKFLQIENAAEEPRVLCIIQDTTNSKTVNERITLNLPASTPVRKLFEDVANKVGYINGTFDLVWGNGINTADMAPLDHTSDKSLLDANFEPGKKNFLHLTDKDGEQPQILLEDSSAGEDSVHDRFIGPLPREGSGGSTSDYVSQSYSYSSILNKSETGYVGLVNQAMTCYLNSLLQTLFMTPEFRNALYKWEFEESEEDPVTSIPYQLQRLFVLLQTSKKRAIETTDVTRSFGWDSSEAWQQHDVQELCRVMFDALEQKWKQTEQADLINELYQGKLKDYVRCLECGYEGWRIDTYLDIPLVIRPYGSSQAFASVEEALHAFIQPEILDGPNQYFCERCKKKCDARKGLRFLHFPYLLTLQLKRFDFDYTTMHRIKLNDRMTFPEELDMSTFIDVEDEKSPQTESCTDSGAENEGSCHSDQMSNDFSNDDGVDEGICLETNSGTEKISKSGLEKNSLIYELFSVMVHSGSAAGGHYYACIKSFSDEQWYSFNDQHVSRITQEDIKKTHGGSSGSRGYYSSAFASSTNAYMLIYRLKDPARNAKFLEVDEYPEHIKNLVQKERELEEQEKRQREIERNTCKIKLFCLHPTKQVMMENKLEVHKDKTLKEAVEMAYKMMDLEEVIPLDCCRLVKYDEFHDYLERSYEGEEDTPMGLLLGGVKSTYMFDLLLETRKPDQVFQSYKPGEVMVKVHVVDLKAESVAAPITVRAYLNQTVTEFKQLISKAIHLPAETMRIVLERCYNDLRLLSVSSKTLKAEGFFRSNKVFVESSETLDYQMAFADSHLWKLLDRHANTIRLFVLLPEQSPVSYSKRTAYQKAGGDSGNVDDDCERVKGPVGSLKSVEAILEESTEKLKSLSLQQQQDGDNGDSSKSTETSDFENIESPLNERDSSASVDNRELEQHIQTSDPENFQSEERSDSDVNNDRSTSSVDSDILSSSHSSDTLCNADNAQIPLANGLDSHSITSSRRTKANEGKKETWDTAEEDSGTDSEYDESGKSRGEMQYMYFKAEPYAADEGSGEGHKWLMVHVDKRITLAAFKQHLEPFVGVLSSHFKVFRVYASNQEFESVRLNETLSSFSDDNKITIRLGRALKKGEYRVKVYQLLVNEQEPCKFLLDAVFAKGMTVRQSKEELIPQLREQCGLELSIDRFRLRKKTWKNPGTVFLDYHIYEEDINISSNWEVFLEVLDGVEKMKSMSQLAVLSRRWKPSEMKLDPFQEVVLESSSVDELREKLSEISGIPLDDIEFAKGRGTFPCDISVLDIHQDLDWNPKVSTLNVWPLYICDDGAVIFYRDKTEELMELTDEQRNELMKKESSRLQKTGHRVTYSPRKEKALKIYLDGAPNKDLTQD

SEQ ID NO: 43 - protein, 711 aa, Homo sapiens
MAQVRETSLPSGSGVRWISGGGGGASPEEAVEKAGKMEEAAAGATKASSRREAEEMKLEPLQEREPAPEENLTWSSSGGDEKVLPSIPLRCHSSSSPVCPRRKPRPRPQPRARSRSQPGLSAPPPPPARPPPPPPPPPPPAPRPRAWRGSRRRSRPGSRPQTRRSCSGDLDGSGDPGGLGDWLLEVEFGQGPTGCSHVESFKVGKNWQKNLRLIYQRFVWSGTPETRKRKAKSCICHVCSTHMNRLHSCLSCVFFGCFTEKHIHKHAETKQHHLAVDLYHGVIYCFMCKDYVYDKDIEQIAKETKEKILRLLTSTSTDVSHQQFMTSGFEDKQSTCETKEQEPKLVKPKKKRRKKSVYTVGLRGLINLGNTCFMNCIVQALTHIPLLKDFFLSDKHKCIMTSPSLCLVCEMSSLFHAMYSGSRTPHIPYKLLHLIWIHAEHLAGYRQQDAHEFLIAILDVLHRHSKDDSGGQEANNPNCCNCIIDQIFTGGLQSDVTCQACHSVSTTIDPCWDISLDLPGSCATFDSQNPERADSTVSRDDHIPGIPSLTDCLQWFTRPEHLGSSAKIKCNSCQSYQESTKQLTMKKLPIVACFHLKRFEHVGKQRRKINTFISFPLELDMTPFLASTKESRMKEGQPPTDCVPNENKYSLFAVINHHGTLESGHYTSFIRQQKDQWFSCDDAIITKATIEDLLYSEGYLLFYHKQGLEKD

SEQ ID NO: 44 - protein, 1123 aa, Homo sapiens
MPIVDKLKEALKPGRKDSADDGELGKLLASSAKKVLLQKIEFEPASKSFSYQLEALKSKYVLLNPKTEGASRHKSGDDPPARRQGSEHTYESCGDGVPAPQKVLFPTERLSLRWERVFRVGAGLHNLGNTCFLNATIQCLTYTPPLANYLLSKEHARSCHQGSFCMLCVMQNHIVQAFANSGNAIKPVSFIRDLKKIARHFRFGNQEDAHEFLRYTIDAMQKACLNGCAKLDRQTQATTLVHQIFGGYLRSRVKCSVCKSVSDTYDPYLDVALEIRQAANIVRALELFVKADVLSGENAYMCAKCKKKVPASKRFTIHRTSNVLTLSLKRFANFSGGKITKDVGYPEFLNIRPYMSQNNGDPVMYGLYAVLVHSGYSCHAGHYYCYVKASNGQWYQMNDSLVHSSNVKVVLNQQAYVLFYLRIPGSKKSPEGLISRTGSSSLPGRPSVIPDHSKKNIGNGIISSPLTGKRQDSGTMKKPHTTEEIGVPISRNGSTLGLKSQNGCIPPKLPSGSPSPKLSQTPTHMPTILDDPGKKVKKPAPPQHFSPRTAQGLPGTSNSNSSRSGSQRQGSWDSRDVVLSTSPKLLATATANGHGLKGNDESAGLDRRGSSSSSPEHSASSDSTKAPQTPRSGAAHLCDSQETNCSTAGHSKTPPSGADSKTVKLKSPVLSNTTTEPASTMSPPPAKKLALSAKKASTLWRATGNDLRPPPPSPSSDLTHPMKTSHPVVASTWPVHRARAVSPAPQSSSRLQPPFSPHPTLLSSTPKPPGTSEPRSCSSISTALPQVNEDLVSLPHQLPEASEPPQSPSEKRKKTFVGEPQRLGSETRLPQHIREATAAPHGKRKRKKKKRPEDTAASALQEGQTQRQPGSPMYRREGQAQLPAVRRQEDGTQPQVNGQQVGCVTDGHHASSRKRRRKGAEGLGEEGGLHQDPLRHSCSPMGDGDPEAMEESPRKKKKKKRKQETQRAVEEDGHLKCPRSAKPQDAVVPESSSCAPSANGWCPGDRMGLSQAPPVSWNGERESDVVQELLKYSSDKAYGRKVLTWDGKMSAVSQDAIEDSRQARTETVVDDWDEEFDRGKEKKIKKFKREKRRNFNAFQKLQTRRNFWSVTHPAKAASLSYRR

SEQ ID NO: 45 - protein, 712 aa, Homo sapiens
MLAMDTCKHVGQLQLAQDHSSLNPQKWHCVDCNTTESIWACLSCSHVACGRYIEEHALKHFQESSHPVALEVNEMYVFCYLCDDYVLNDNTTGDLKLLRRTLSAIKSQNYHCTTRSGRFLRSMGTGDDSYFLHDGAQSLLQSEDQLYTALWHRRRILMGKIFRTWFEQSPIGRKKQEEPFQEKIVVKREVKKRRQELEYQVKAELESMPPRKSLRLQGLAQSTIIEIVSVQVPAQTPASPAKDKVLSTSENEISQKVSDSSVKRRPIVTPGVTGLRNLGNTCYMNSVLQVLSHLLIFRQCFLKLDLNQWLAMTASEKTRSCKHPPVTDTVVYQMNECQEKDTGFVCSRQSSLSSGLSGGASKGRKMELIQPKEPTSQYISLCHELHTLFQVMWSGKWALVSPFAMLHSVWRLIPAFRGYAQQDAQEFLCELLDKIQRELETTGTSLPALIPTSQRKLIKQVLNVVNNIFHGQLLSQVTCLACDNKSNTIEPFWDLSLEFPERYQCSGKDIASQPCLVTEMLAKFTETEALEGKIYVCDQCNSKRRRFSSKPVVLTEAQKQLMICHLPQVLRLHLKRFRWSGRNNREKIGVHVGFEEILNMEPYCCRETLKSLRPECFIYDLSAVVMHHGKGFGSGHYTAYCYNSEGGFWVHCNDSKLSMCTMDEVCKAQAYILFYTQRVTENGHSKLLPPELLLGSQHPNEDADTSSNEILS

SEQ ID NO: 46 - protein, 1118 aa, Homo sapiens
MPAVASVPKELYLSSSLKDLNKKTEVKPEKISTKSYVHSALKIFKTAEECRLDRDEERAYVLYMKYVTVYNLIKKRPDFKQQQDYFHSILGPGNIKKAVEEAERLSESLKLRYEEAEVRKKLEEKDRQEEAQRLQQKRQETGREDGGTLAKGSLENVLDSKDKTQKSNGEKNEKCETKEKGAITAKELYTMMTDKNISLIIMDARRMQDYQDSCILHSLSVPEEAISPGVTASWIEAHLPDDSKDTWKKRGNVEYVVLLDWFSSAKDLQIGTTLRSLKDALFKWESKTVLRNEPLVLEGGYENWLLCYPQYTTNAKVTPPPRRQNEEVSISLDFTYPSLEESIPSKPAAQTPPASIEVDENIELISGQNERMGPLNISTPVEPVAASKSDVSPIIQPVPSIKNVPQIDRTKKPAVKLPEEHRIKSESTNHEQQSPQSGKVIPDRSTKPVVFSPTLMLTDEEKARIHAETALLMEKNKQEKELRERQQEEQKEKLRKEEQEQKAKKKQEAEENEITEKQQKAKEEMEKKESEQAKKEDKETSAKRGKEITGVKRQSKSEHETSDAKKSVEDRGKRCPTPEIQKKSTGDVPHTSVTGDSGSGKPFKIKGQPESGILRTGTFREDTDDTERNKAQREPLTRARSEEMGRIVPGLPSGWAKFLDPITGTFRYYHSPTNTVHMYPPEMAPSSAPPSTPPTHKAKPQIPAERDREPSKLKRSYSSPDITQAIQEEEKRKPTVTPTVNRENKPTCYPKAEISRLSASQIRNLNPVFGGSGPALTGLRNLGNTCYMNSILQCLCNAPHLADYFNRNCYQDDINRSNLLGHKGEVAEEFGIIMKALWTGQYRYISPKDFKITIGKINDQFAGYSQQDSQELLLFLMDGLHEDLNKADNRKRYKEENNDHLDDFKAAEHAWQKHKQLNESIIVALFQGQFKSTVQCLTCHKKSRTFEAFMYLSLPLASTSKCTLQDCLRLFSKEEKLTDNNRFYCSHCRARRDSLKKIEIWKLPPVLLVHLKRFSYDGRWKQKLQTSVDFPLENLDLSQYVIGPKNNLKKYNLFSVSNHYGGLDGGHYTAYCKNAARQRWFKFDDHEVSDISVSSVKSSAAYILFYTSLGPRVTDVAT

SEQ ID NO: 47 - protein, 979 aa, Homo sapiens
MSPLKIHGPIRIRSMQTGITKWKEGSFEIVEKENKVSLVVHYNTGGIPRIFQLSHNIKNVVLRPSGAKQSRLMLTLQDNSFLSIDKVPSKDAEEMRLFLDAVHQNRLPAAMKPSQGSGSFGAILGSRTSQKETSRQLSYSDNQASAKRGSLETKDDIPFRKVLGNPGRGSIKTVAGSGIARTIPSLTSTSTPLRSGLLENRTEKRKRMISTGSELNEDYPKENDSSSNNKAMTDPSRKYLTSSREKQLSLKQSEENRTSGLLPLQSSSFYGSRAGSKEHSSGGTNLDRTNVSSQTPSAKRSLGFLPQPVPLSVKKLRCNQDYTGWNKPRVPLSSHQQQQLQGFSNLGNTCYMNAILQSLFSLQSFANDLLKQGIPWKKIPLNALIRRFAHLLVKKDICNSETKKDLLKKVKNAISATAERFSGYMQNDAHEFLSQCLDQLKEDMEKLNKTWKTEPVSGEENSPDISATRAYTCPVITNLEFEVQHSIICKACGEIIPKREQFNDLSIDLPRRKKPLPPRSIQDSLDLFFRAEELEYSCEKCGGKCALVRHKFNRLPRVLILHLKRYSFNVALSLNNKIGQQVIIPRYLTLSSHCTENTKPPFTLGWSAHMAISRPLKASQMVNSCITSPSTPSKKFTFKSKSSLALCLDSDSEDELKRSVALSQRLCEMLGNEQQQEDLEKDSKLCPIEPDKSELENSGFDRMSEEELLAAVLEISKRDASPSLSHEDDDKPTSSPDTGFAEDDIQEMPENPDTMETEKPKTITELDPASFTEITKDCDENKENKTPEGSQGEVDWLQQYDMEREREEQELQQALAQSLQEQEAWEQKEDDDLKRATELSLQEFNNSFVDALGSDEDSGNEDVFDMEYTEAEAEELKRNAETGNLPHSYRLISVVSHIGSTSSSGHYISDVYDIKKQAWFTYNDLEVSKIQEAAVQSDRDRSGYIFFYMHKEIFDELLETEKNSQSLSTEVGKTTRQAL

SEQ ID NO: 48 - protein, 530 aa, Homo sapiens
MEEDSLYLGGEWQFNHFSKLTSSRLDAAFAEIQRTSLPEKSPLSCETRVDLCDDLVPEARQLAPREKLPLSSRRPAAVGAGLQNMGNTCYVNASLQCLTYTPPLANYMLSREHSQTCHRHKGCMLCTMQAHITRALHNPGHVIQPSQALAAGFHRGKQEDAHEFLMFTVDAMKKACLPGHKQVDHPSKDTTLIHQIFGGYWRSQIKCLHCHGISDTFDPYLDIALDIQAAQSVQQALEQLVKPEELNGENAYHCGVCLQRAPASKTLTLHTSAKVLILVLKRFSDVTGNKIAKNVQYPECLDMQPYMSQQNTGPLVYVLYAVLVHAGWSCHNGHYFSYVKAQEGQWYKMDDAEVTAASITSVLSQQAYVLFYIQKSEWERHSESVSRGREPRALGAEDTDRRATQGELKRDHPCLQAPELDEHLVERATQESTLDRWKFLQEQNKTKPEFNVRKVEGTLPPDVLVIHQSKYKCGMKNHHPEQQSSLLNLSSSTPTHQESMNTGTLASLRGRARRSKGKNKHSKRALLVCQ

SEQ ID NO: 49 - protein, 530 aa, Homo sapiens
MGDDSLYLGGEWQFNHFSKLTSSRPDAAFAEIQRTSLPEKSPLSSETRVDLCDDLAPVARQLAPREKLPLSSRRPAAVGAGLQNMGNTCYENASLQCLTYTLPLANYMLSREHSQTCQRPKCCMLCTMQAHITWALHSPGHVIQPSQALASGFHRGKQEDVHEFLMFTVDAMKKACLPGHKQVDHHSKDTTLIHQIFGGCWRSQIKCLHCHGISDTFDPYLDIALDIQAAQSVKQALEQLVKPEELNGENAYHCGLCLQRAPASNTLTLHTSAKVLILVLKRFSDVAGNKLAKNVQYPECLDMQPYMSQQNTGPLVYVLYAVLVHAGWSCHDGHYFSYVKAQEGQWYKMDDAEVTVCSITSVLSQQAYVLFYIQKSEWERHSESVSRGREPRALGAEDTDRRAKQGELKRDHPCLQAPELDEHLVERATQESTLDHWKFLQEQNKTKPEFNVGKVEGTLPPNALVIHQSKYKCGMKNHHPEQQSSLLNLSSTTRTDQESMNTGTLASLQGRTRRAKGKNKHSKRALLVCQ

SEQ ID NO: 50 - protein, 1684 aa, Homo sapiens
MSWKRNYFSGGRGSVQGMFAPRSSTSIAPSKGLSNEPGQNSCFLNSALQVLWHLDIFRRSFRQLTTHKCMGDSCIFCALKGIFNQFQCSSEKVLPSDTLRSALAKTFQDEQRFQLGIMDDAAECFENLLMRIHFHIADETKEDICTAQHCISHQKFAMTLFEQCVCTSCGATSDPLPFIQMVHYISTTSLCNQAICMLERREKPSPSMFGELLQNASTMGDLRNCPSNCGERIRIRRVLMNAPQIITIGLVWDSDHSDLAEDVIHSLGTCLKLGDLFFRVTDDRAKQSELYLVGMICYYGKHYSTFFFQTKIRKWMYFDDAHVKEIGPKWKDVVTKCIKGHYQPLLLLYADPQGTPVSTQDLPPQAEFQSYSRTCYDSEDSGREPSISSDTRTDSSTESYPYKHSHHESVVSHFSSDSQGTVIYNVENDSMSQSSRDTGHLTDSECNQKHTSKKGSLIERKRSSGRVRRKGDEPQASGYHSEGETLKEKQAPRNASKPSSSTNRLRDFKETVSNMIHNRPSLASQTNVGSHCRGRGGDQPDKKPPRTLPLHSRDWEIESTSSESKSSSSSKYRPTWRPKRESLNIDSIFSKDKRKHCGYTQLSPFSEDSAKEFIPDEPSKPPSYDIKFGGPSPQYKRWGPARPGSHLLEQHPRLIQRMESGYESSERNSSSPVSLDAALPESSNVYRDPSAKRSAGLVPSWRHIPKSHSSSILEVDSTASMGGWTKSQPFSGEEISSKSELDELQEEVARRAQEQELRRKREKELEAAKGFNPHPSRFMDLDELQNQGRSDGFERSLQEAESVFEESLHLEQKGDCAAALALCNEAISKLRLALHGASCSTHSRALVDKKLQISIRKARSLQDRMQQQQSPQQPSQPSACLPTQAGTLSQPTSEQPIPLQVLLSQEAQLESGMDTEFGASSFFHSPASCHESHSSLSPESSAPQHSSPSRSALKLLTSVEVDNIEPSAFHRQGLPKAPGWTEKNSHHSWEPLDAPEGKLQGSRCDNSSCSKLPPQEGRGIAQEQLFQEKKDPANPSPVMPGIATSERGDEHSLGCSPSNSSAQPSLPLYRTCHPIMPVASSFVLHCPDPVQKTNQCLQGQSLKTSLTLKVDRGSEETYRPEFPSTKGLVRSLAEQFQRMQGVSMRDSTGFKDRSLSGSLRKNSSPSDSKPPFSQGQEKGHWPWAKQQSSLEGGDRPLSWEESTEHSSLALNSGLPNGETSSGGQPRLAEPDIYQEKLSQVRDVRSKDLGSSTDLGTSLPLDSWVNITRFCDSQLKHGAPRPGMKSSPHDSHTCVTYPERNHILLHPHWNQDTEQETSELESLYQASLQASQAGCSGWGQQDTAWHPLSQTGSADGMGRRLHSAHDPGLSKTSTAEMEHGLHEARTVRTSQATPCRGLSRECGEDEQYSAENLRRISRSLSGTVVSEREEAPVSSHSFDSSNVRKPLETGHRCSSSSSLPVIHDPSVFLLGPQLYLPQPQFLSPDVLMPTMAGEPNRLPGTSRSVQQFLAMCDRGETSQGAKYTGRTLNYQSLPHRSRTDNSWAPWSETNQHIGTRFLTTPGCNPQLTYTATLPERSKGLQVPHTQSWSDLFHSPSHPPIVHPVYPPSSSLHVPLRSAWNSDPVPGSRTPGPRRVDMPPDDDWRQSSYASHSGHRRTVGEGFLFVLSDAPRREQIRARVLQHSQW

SEQ ID NO: 51 - protein, 565 aa, Homo sapiens
MSGRSKRESRGSTRGKRESESRGSSGRVKRERDREREPEAASSRGSPVRVKREFEPASAREAPASVVPFVRVKREREVDEDSEPEREVRAKNGRVDSEDRRSRHCPYLDTINRSVLDFDFEKLCSISLSHINAYACLVCGKYFQGRGLKSHAYIHSVQFSHHVFLNLHTLKFYCLPDNYEIIDSSLEDITYVLKPTFTKQQIANLDKQAKLSRAYDGTTYLPGIVGLNNIKANDYANAVLQALSNVPPLRNYFLEEDNYKNIKRPPGDIMFLLVQRFGELMRKLWNPRNFKAHVSPHEMLQAVVLCSKKTFQITKQGDGVDFLSWFLNALHSALGGTKKKKKTIVTDVFQGSMRIFTKKLPHPDLPAEEKEQLLHNDEYQETMVESTFMYLTLDLPTAPLYKDEKEQLIIPQVPLFNILAKFNGITEKEYKTYKENFLKRFQLTKLPPYLIFCIKRFTKNNFFVEKNPTIVNFPITNVDLREYLSEEVQAVHKNTTYDLIANIVHDGKPSEGSYRIHVLHHGTGKWYELQDLQVTDILPQMITLSEAYIQIWKRRDNDETNQQGA

SEQ ID NO: 52 - protein, 1018 aa, Homo sapiens
MDKILEAVVTSSYPVSVKQGLVRRVLEAARQPLEREQCLALLALGARLYVGGAEELPRRVGCQLLHVAGRHHPDVFAEFFSARRVLRLLQGGAGPPGPRALACVQLGLQLLPEGPAADEVFALLRREVLRTVCERPGPAACAQVARLLARHPRCVPDGPHRLLFCQQLVRCLGRFRCPAEGEEGAVEFLEQAQQVSGLLAQLWRAQPAAILPCLKELFAVISCAEEEPPSSALASVVQHLPLELMDGVVRNLSNDDSVTDSQMLTAISRMIDWVSWPLGKNIDKWIIALLKGLAAVKKFSILIEVSLTKIEKVFSKLLYPIVRGAALSVLKYMLLTFQHSHEAFHLLLPHIPPMVASLVKEDSNSGTSCLEQLAELVHCMVFRFPGFPDLYEPVMEAIKDLHVPNEDRIKQLLGQDAWTSQKSELAGFYPRLMAKSDTGKIGLINLGNTCYVNSILQALFMASDFRHCVLRLTENNSQPLMTKLQWLFGFLEHSQRPAISPENFLSASWTPWFSPGTQQDCSEYLKYLLDRLHEEEKTGTRICQKLKQSSSPSPPEEPPAPSSTSVEKMFGGKIVTRICCLCCLNVSSREEAFTDLSLAFPPPERCRRRRLGSVMRPTEDITARELPPPTSAQGPGRVGPRRQRKHCITEDTPPTSLYIEGLDSKEAGGQSSQEERIEREEEGKEERTEKEEVGEEEESTRGEGEREKEEEVEEEEEKVEKETEKEAEQEKEEDSLGAGTHPDAAIPSGERTCGSEGSRSVLDLVNYFLSPEKLTAENRYYCESCASLQDAEKVVELSQGPCYLILTLLRFSFDLRTMRRRKILDDVSIPLLLRLPLAGGRGQAYDLCSVVVHSGVSSESGHYYCYAREGAARPAASLGTADRPEPENQWYLFNDTRVSFSSFESVSNVTSFFPKDTAYVLFYRQRPREGPEAELGSSRVRTEPTLHKDLMEAISKDNILYLQEQEKEARSRAAYISALPTSPHWGRGFDEDKDEDEGSPGGCNPAGGNGGDFHRLVF

SEQ ID NO: 53 - protein, 981 aa, Homo sapiens
MAEGGAADLDTQRSDIATLLKTSLRKGDTWYLVDSRWFKQWKKYVGFDSWDKYQMGDQNVYPGPIDNSGLLKDGDAQSLKEHLIDELDYILLPTEGWNKLVSWYTLMEGQEPIARKVVEQGMFVKHCKVEVYLTELKLCENGNMNNVVTRRFSKADTIDTIEKEIRKIFSIPDEKETRLWNKYMSNTFEPLNKPDSTIQDAGLYQGQVLVIEQKNEDGTWPRGPSTPKSPGASNFSTLPKISPSSLSNNYNNMNNRNVKNSNYCLPSYTAYKNYDYSEPGRNNEQPGLCGLSNLGNTCFMNSAIQCLSNTPPLTEYFLNDKYQEELNFDNPLGMRGEIAKSYAELIKQMWSGKFSYVTPRAFKTQVGRFAPQFSGYQQQDCQELLAFLLDGLHEDLNRIRKKPYIQLKDADGRPDKVVAEEAWENHLKRNDSIIVDIFHGLFKSTLVCPECAKISVTFDPFCYLTLPLPMKKERTLEVYLVRMDPLTKPMQYKVVVPKIGNILDLCTALSALSGIPADKMIVTDIYNHRFHRIFAMDENLSSIMERDDIYVFEININRTEDTEHVIIPVCLREKFRHSSYTHHTGSSLFGQPFLMAVPRNNTEDKLYNLLLLRMCRYVKISTETEETEGSLHCCKDQNINGNGPNGIHEEGSPSEMETDEPDDESSQDQELPSENENSQSEDSVGGDNDSENGLCTEDTCKGQLTGHKKRLFTFQFNNLGNTDINYIKDDTRHIRFDDRQLRLDERSFLALDWDPDLKKRYFDENAAEDFEKHESVEYKPPKKPFVKLKDCIELFTTKEKLGAEDPWYCPNCKEHQQATKKLDLWSLPPVLVVHLKRFSYSRYMRDKLDTLVDFPINDLDMSEFLINPNAGPCRYNLIAVSNHYGGMGGGHYTAFAKNKDDGKWYYFDDSSVSTASEDQIVSKAAYVLFYQRQDTFSGTGFFPLDRETKGASAATGIPLESDEDSNDNDNDIENENCMHTN

SEQ ID NO: 54 - protein, 922 aa, Homo sapiens
MISLKVCGFIQIWSQKTGMTKLKEALIETVQRQKEIKLVVTFKSGKFIRIFQLSNNIRSVVLRHCKKRQSHLRLTLKNNVFLFIDKLSYRDAKQLNMFLDIIHQNKSQQPMKSDDDWSVFESRNMLKEIDKTSFYSICNKPSYQKMPLFMSKSPTHVKKGILENQGGKGQNTLSSDVQTNEDILKEDNPVPNKKYKTDSLKYIQSNRKNPSSLEDLEKDRDLKLGPSFNTNCNGNPNLDETVLATQTLNAKNGLTSPLEPEHSQGDPRCNKAQVPLDSHSQQLQQGFPNLGNTCYMNAVLQSLFAIPSFADDLLTQGVPWEYIPFEALIMTLTQLLALKDFCSTKIKRELLGNVKKVISAVAEIFSGNMQNDAHEFLGQCLDQLKEDMEKLNATLNTGKECGDENSSPQMHVGSAATKVFVCPVVANFEFELQLSLICKACGHAVLKVEPNNYLSINLHQETKPLPLSIQNSLDLFFKEEELEYNCQMCKQKSCVARHTFSRLSRVLIIHLKRYSFNNAWLLVKNNEQVYIPKSLSLSSYCNESTKPPLPLSSSAPVGKCEVLEVSQEMISEINSPLTPSMKLTSESSDSLVLPVEPDKNADLQRFQRDCGDASQEQHQRDLENGSALESELVHFRDRAIGEKELPVADSLMDQGDISLPVMYEDGGKLISSPDTRLVEVHLQEVPQHPELQKYEKTNTFVEFNFDSVTESTNGFYDCKENRIPEGSQGMAEQLQQCIEESIIDEFLQQAPPPGVRKLDAQEHTEETLNQSTELRLQKADLNHLGALGSDNPGNKNILDAENTRGEAKELTRNVKMGDPLQAYRLISVVSHIGSSPNSGHYISDVYDFQKQAWFTYNDLCVSEISETKMQEARLHSGYIFFYMHNGIFEELLRKAENSRLPSTQAGVIPQGEYEGDSLYRPA

SEQ ID NO: 55 - protein, 1406 aa, Homo sapiens
MDMVENADSLQAQERKDILMKYDKGHRAGLPEDKGPEPVGINSSIDRFGILHETELPPVTAREAKKIRREMTRTSKWMEMLGEWETYKHSSKLIDRVYKGIPMNIRGPVWSVLLNIQEIKLKNPGRYQIMKERGKRSSEHIHHIDLDVRTTLRNHVFFRDRYGAKQRELFYILLAYSEYNPEVGYCRDLSHITALFLLYLPEEDAFWALVQLLASERHSLPGFHSPNGGTVQGLQDQQEHVVPKSQPKTMWHQDKEGLCGQCASLGCLLRNLIDGISLGLTLRLWDVYLVEGEQVLMPITSIALKVQQKRLMKTSRCGLWARLRNQFFDTWAMNDDTVLKHLRASTKKLTRKQGDLPPPAKREQGSLAPRPVPASRGGKTLCKGYRQAPPGPPAQFQRPICSASPPWASRFSTPCPGGAVREDTYPVGTQGVPSLALAQGGPQGSWRFLEWKSMPRLPTDLDIGGPWFPHYDFEWSCWVRAISQEDQLATCWQAEHCGEVHNKDMSWPEEMSFTANSSKIDRQKVPTEKGATGLSNLGNTCFMNSSIQCVSNTQPLTQYFISGRHLYELNRTNPIGMKGHMAKCYGDLVQELWSGTQKSVAPLKLRRTIAKYAPKFDGFQQQDSQELLAFLLDGLHEDLNRVHEKPYVELKDSDGRPDWEVAAEAWDNHLRRNRSIIVDLFHGQLRSQVKCKTCGHISVRFDPFNFLSLPLPMDSYMDLEITVIKLDGTTPVRYGLRLNMDEKYTGLKKQLRDLCGLNSEQILLAEVHDSNIKNFPQDNQKVQLSVSGFLCAFEIPVPSSPISASSPTQIDFSSSPSTNGMFTLTTNGDLPKPIFIPNGMPNTVVPCGTEKNFTNGMVNGHMPSLPDSPFTGYIIAVHRKMMRTELYFLSPQENRPSLFGMPLIVPCTVHTRKKDLYDAVWIQVSWLARPLPPQEASIHAQDRDNCMGYQYPFTLRVVQKDGNSCAWCPQYRFCRGCKIDCGEDRAFIGNAYIAVDWHPTALHLRYQTSQERVVDKHESVEQSRRAQAEPINLDSCLRAFTSEEELGESEMYYCSKCKTHCLATKKLDLWRLPPFLIIHLKRFQFVNDQWIKSQKIVRFLRESFDPSAFLVPRDPALCQHKPLTPQGDELSKPRILAREVKKVDAQSSAGKEDMLLSKSPSSLSANISSSPKGSPSSSRKSGTSCPSSKNSSPNSSPRTLGRSKGRLRLPQIGSKNKPSSSKKNLDASKENGAGQICELADALSRGHMRGGSQPELVTPQDHEVALANGFLYEHEACGNGCGDGYSNGQLGNHSEEDSTDDQREDTHIKPIYNLYAISCHSGILSGGHYITYAKNPNCKWYCYNDSSCEELHPDEIDTDSAYILFYEQQGIDYAQFLPKIDGKKMADTSSTDEDSESDYEKYSMLQ

SEQ ID NO: 56 - protein, 1073 aa, Homo sapiens
MAWVKFLRKPGGNLGKVYQPGSMLSLAPTKGLLNEPGQNSCFLNSAVQVLWQLDIFRRSLRVLTGHVCQGDACIFCALKTIFAQFQHSREKALPSDNIRHALAESFKDEQRFQLGLMDDAAECFENMLERIHFHIVPSRDADMCTSKSCITHQKFAMTLYEQCVCRSCGASSDPLPFTEFVRYISTTALCNEVERMLERHERFKPEMFAELLQAANTTDDYRKCPSNCGQKIKIRRVLMNCPEIVTIGLVWDSEHSDLTEAVVRNLATHLYLPGLFYRVTDENAKNSELNLVGMICYTSQHYCAFAFHTKSSKWVFFDDANVKEIGTRWKDVVSKCIRCHFQPLLLFYANPDGTAVSTEDALRQVISWSHYKSVAENMGCEKPVIHKSDNLKENGFGDQAKQRENQKFPTDNISSSNRSHSHTGVGKGPAKLSHIDQREKIKDISRECALKAIEQKNLLSSQRKDLEKGQRKDLGRHRDLVDEDLSHFQSGSPPAPNGFKQHGNPHLYHSQGKGSYKHDRVVPQSRASAQIISSSKSQILAPGEKITGKVKSDNGTGYDTDSSQDSRDRGNSCDSSSKSRNRGWKPMRETLNVDSIFSESEKRQHSPRHKPNISNKPKSSKDPSFSNWPKENPKQKGLMTIYEDEMKQEIGSRSSLESNGKGAEKNKGLVEGKVHGDNWQMQRTESGYESSDHISNGSTNLDSPVIDGNGTVMDISGVKETVCFSDQITTSNLNKERGDCTSLQSQHHLEGFRKELRNLEAGYKSHEFHPESHLQIKNHLIKRSHVHEDNGKLFPSSSLQIPKDHNAREHIHQSDEQKLEKPNECKFSEWLNIENSERTGLPFHVDNSASGKRVNSNEPSSLWSSHLRTVGLKPETAPLIQQQNIMDQCYFENSLSTECIIRSASRSDGCQMPKLFCQNLPPPLPPKKYAITSVPQSEKSESTPDVKLTEVFKATSHLPKHSLSTASEPSLEVSTHMNDERHKETFQVRECFGNTPNCPSSSSTNDFQANSGAIDAFCQPELDSISTCPNETVSLTTYFSVDSCMTDTYRLKYHQRPKLSFPESSGFCNNSLS

SEQ ID NO: 57 - protein, 530 aa, Homo sapiens
MEDDSLYLRGEWQFNHFSKLTSSRPDAAFAEIQRTSLPEKSPLSCETRVDLCDDLAPVARQLAPREKLPLSSRRPAAVGAGLQNMGNTCYVNASLQCLTYTPPLANYMLSREHSQTCHRHKGCMLCTMQAHITRALHNPGHVIQPSQALAAGFHRGKQEDAHEFLMFTVDAMKKACLPGHKQVDHHSKDTTLIHQIFGGYWRSQIKCLHCHGISDTFDPYLDIALDIQAAQSVQQALEQLVKPEELNGENAYHCGVCLQRAPASKTLTLHTSAKVLILVLKRFSDVTGNKIAKNVQYPECLDMQPYMSQPNTGPLVYVLYAVLVHAGWSCHNGHYFSYVKAQEGQWYKMDDAEVTASSITSVLSQQAYVLFYIQKSEWERHSESVSRGREPRALGAEDTDRRATQGELKRDHPCLQAPELDEHLVERATQESTLDHWKFLQEQNKTKPEFNVRKVEGTLPPDVLVIHQSKYKCGMKNHHPEQQSSLLNLSSSTPTHQESMNTGTLASLRGRARRSKGKNKHSKRALLVCQ

SEQ ID NO: 58 - protein, 858 aa, Homo sapiens
MAELSEEALLSVLPTIRVPKAGDRVHKDECAFSFDTPESEGGLYICMNTFLGFGKQYVERHFNKTGQRVYLHLRRTRRPKEEDPATGTGDPPRKKPTRLAIGVEGGFDLSEEKFELDEDVKIVILPDYLEIARDGLGGLPDIVRDRVTSAVEALLSADSASRKQEVQAWDGEVRQVSKHAFSLKQLDNPARIPPCGWKCSKCDMRENLWLNLTDGSILCGRRYFDGSGGNNHAVEHYRETGYPLAVKLGTITPDGADVYSYDEDDMVLDPSLAEHLSHFGIDMLKMQKTDKTMTELEIDMNQRIGEWELIQESGVPLKPLFGPGYTGIRNLGNSCYLNSVVQVLFSIPDFQRKYVDKLEKIFQNAPTDPTQDFSTQVAKLGHGLLSGEYSKPVPESGDGERVPEQKEVQDGIAPRMFKALIGKGHPEFSTNRQQDAQEFFLHLINMVERNCRSSENPNEVFRFLVEEKIKCLATEKVKYTQRVDYIMQLPVPMDAALNKEELLEYEEKKRQAEEEKMALPELVRAQVPFSSCLEAYGAPEQVDDFWSTALQAKSVAVKTTRFASFPDYLVIQIKKFTFGLDWVPKKLDVSIEMPEELDISQLRGTGLQPGEEELPDIAPPLVTPDEPKGSLGFYGNEDEDSFCSPHFSSPTSPMLDESVIIQLVEMGFPMDACRKAVYYTGNSGAEAAMNWVMSHMDDPDFANPLILPGSSGPGSTSAAADPPPEDCVTTIVSMGFSRDQALKALRATNNSLERAVDWIFSHIDDLDAEAAMDISEGRSAADSISESVPVGPKVRDGPGKYQLFAFISHMGTSTMCGHYVCHIKKEGRWVIYNDQKVCASEKPPKDLGYIYFYQRVAS

SEQ ID NO: 59 - protein, 1055 aa, Homo sapiens
MTVEQNVLQQSAAQKHQQTFLNQLREITGINDTQILQQALKDSNGNLELAVAFLTAKNAKTPQQEETTYYQTALPGNDRYISVGSQADTNVIDLTGDDKDDLQRAIALSLAESNRAFRETGITDEEQAISRVLEASIAENKACLKRTPTEVWRDSRNPYDRKRQDKAPVGLKNVGNTCWFSAVIQSLFNLLEFRRLVLNYKPPSNAQDLPRNQKEHRNLPFMRELRYLFALLVGTKRKYVDPSRAVEILKDAFKSNDSQQQDVSEFTHKLLDWLEDAFQMKAEEETDEEKPKNPMVELFYGRFLAVGVLEGKKFENTEMFGQYPLQVNGFKDLHECLEAAMIEGEIESLHSENSGKSGQEHWFTELPPVLTFELSRFEFNQALGRPEKIHNKLEFPQVLYLDRYMHRNREITRIKREEIKRLKDYLTVLQQRLERYLSYGSGPKRFPLVDVLQYALEFASSKPVCTSPVDDIDASSPPSGSIPSQTLPSTTEQQGALSSELPSTSPSSVAAISSRSVIHKPFTQSRIPPDLPMHPAPRHITEEELSVLESCLHRWRTEIENDTRDLQESISRIHRTIELMYSDKSMIQVPYRLHAVLVHEGQANAGHYWAYIFDHRESRWMKYNDIAVTKSSWEELVRDSFGGYRNASAYCLMYINDKAQFLIQEEFNKETGQPLVGIETLPPDLRDFVEEDNQRFEKELEEWDAQLAQKALQEKLLASQKLRESETSVTTAQAAGDPEYLEQPSRSDFSKHLKEETIQIITKASHEHEDKSPETVLQSAIKLEYARLVKLAQEDTPPETDYRLHHVVVYFIQNQAPKKIIEKTLLEQFGDRNLSFDERCHNIMKVAQAKLEMIKPEEVNLEEYEEWHQDYRKFRETTMYLIIGLENFQRESYIDSLLFLICAYQNNKELLSKGLYRGHDEELISHYRRECLLKLNEQAAELFESGEDREVNNGLIIMNEFIVPFLPLLLVDEMEEKDILAVEDMRNRWCSYLGQEMEPHLQEKLTDFLPKLLDCSMEIKSFHEPPKLPSYSTHELCERFARIMLSLSRTPADGR

SEQ ID NO: 60 - protein, 942 aa, Homo sapiens
MTGSNSHITILTLKVLPHFESLGKQEKIPNKMSAFRNHCPHLDSVGEITKEDLIQKSLGTCQDCKVQGPNLWACLENRCSYVGCGESQVDHSTIHSQETKHYLTVNLTTLRVWCYACSKEVFLDRKLGTQPSLPHVRQPHQIQENSVQDFKIPSNTTLKTPLVAVFDDLDIEADEEDELRARGLTGLKNIGNTCYMNAALQALSNCPPLTQFFLDCGGLARTDKKPAICKSYLKLMTELWHKSRPGSVVPTTLFQGIKTVNPTFRGYSQQDAQEFLRCLMDLLHEELKEQVMEVEEDPQTITTEETMEEDKSQSDVDFQSCESCSNSDRAENENGSRCFSEDNNETTMLIQDDENNSEMSKDWQKEKMCNKINKVNSEGEFDKDRDSISETVDLNNQETVKVQIHSRASEYITDVHSNDLSTPQILPSNEGVNPRLSASPPKSGNLWPGLAPPHKKAQSASPKRKKQHKKYRSVISDIFDGTIISSVQCLTCDRVSVTLETFQDLSLPIPGKEDLAKLHSSSHPTSIVKAGSCGEAYAPQGWIAFFMEYVKRFVVSCVPSWFWGPVVTLQDCLAAFFARDELKGDNMYSCEKCKKLRNGVKFCKVQNFPEILCIHLKRFRHELMFSTKISTHVSFPLEGLDLQPFLAKDSPAQIVTYDLLSVICHHGTASSGHYIAYCRNNLNNLWYEFDDQSVTEVSESTVQNAEAYVLFYRKSSEEAQKERRRISNLLNIMEPSLLQFYISRQWLNKFKTFAEPGPISNNDFLCIHGGVPPRKAGYIEDLVLMLPQNIWDNLYSRYGGGPAVNHLYICHTCQIEAEKIEKRRKTELEIFIRLNRAFQKEDSPATFYCISMQWFREWESFVKGKDGDPPGPIDNTKIAVTKCGNVMLRQGADSGQISEETWNFLQSIYGGGPEVILRPPVVHVDPDILQAEEKIEVETRSL

SEQ ID NO: 61 - protein, 565 aa, Homo sapiens
MPQASEHRLGRTREPPVNIQPRVGSKLPFAPRARSKERRNPASGPNPMLRPLPPRPGLPDERLKKLELGRGRTSGPRPRGPLRADHGVPLPGSPPPTVALPLPSRTNLARSKSVSSGDLRPMGIALGGHRGTGELGAALSRLALRPEPPTLRRSTSLRRLGGFPGPPTLFSIRTEPPASHGSFHMISARSSEPFYSDDKMAHHTLLLGSGHVGLRNLGNTCFLNAVLQCLSSTRPLRDFCLRRDFRQEVPGGGRAQELTEAFADVIGALWHPDSCEAVNPTRFRAVFQKYVPSFSGYSQQDAQEFLKLLMERLHLEINRRGRRAPPILANGPVPSPPRRGGALLEEPELSDDDRANLMWKRYLEREDSKIVDLFVGQLKSCLKCQACGYRSTTFEVFCDLSLPIPKKGFAGGKVSLRDCFNLFTKEEELESENAPVCDRCRQKTRSTKKLTVQRFPRILVLHLNRFSASRGSIKKSSVGVDFPLQRLSLGDFASDKAGSPVYQLYALCNHSGSVHYGHYTALCRCQTGWHVYNDSRVSPVSENQVASSEGYVLFYQLMQEPPRCL

SEQ ID NO: 62 - protein, 530 aa, Homo sapiens
MGDDSLYLGGEWQFNHFSKLTSSRPDAAFAEIQRTSLPEKSPLSSETRVDLCDDLAPVARQLAPREKLPLSSRRPAAVGAGLQNMGNTCYENASLQCLTYTLPLANYMLSREHSQTCQRPKCCMLCTMQAHITWALHSPGHVIQPSQALAAGFHRGKQEDVHEFLMFTVDAMKKACLPGHKQVDHHSKDTTLIHQIFGGCWRSQIKCLHCHGISDTFDPYLDIALDIQAAQSVKQALEQLVKPEELNGENAYHCGLCLQRAPASNTLTLHTSAKVLILVLKRFSDVAGNKLAKNVQYPECLDMQPYMSQQNTGPLVYVLYAVLVHAGWSCHDGYYFSYVKAQEGQWYKMDDAEVTVCSITSVLSQQAYVLFYIQKSEWERHSESVSRGREPRALGAEDTDRPATQGELKRDHPCLQVPELDEHLVERATEESTLDHWKFPQEQNKMKPEFNVRKVEGTLPPNVLVIHQSKYKCGMKNHHPEQQSSLLNLSSMNSTDQESMNTGTLASLQGRTRRSKGKNKHSKRSLLVCQ

SEQ ID NO: 63 - protein, 530 aa, Homo sapiens
MEDDSLYLGGEWQFNHFSKLTSSRPDAAFAEIQRTSLPEKSPLSCETRVDLCDDLAPVARQLAPREKLPLSSRRPAAVGAGLQNMGNTCYVNASLQCLTYTPPLANYMLSREHSQTCHRHKGCMLCTMQAHITRALHNPGHVIQPSQALAAGFHRGKQEDAHEFLMFTVDAMKKACLPGHKQVDHHSKDTTLIHQIFGGYWRSQIKCLHCHGISDTFDPYLDIALDIQAAQSVQQALEQLVKPEELNGENAYHCGVCLQRAPASKTLTLHTSAKVLILVLKRFSDVTGNKIAKNVQYPECLDMQPYMSQPNTGPLVYVLYAVLVHAGWSCHNGHYFSYVKAQEGQWYKMDDAEVTASSITSVLSQQAYVLFYIQKSEWERHSESVSRGREPRALGAEDTDRRATQGELKRDHPCLQAPELDEHLVERATQESTLDHWKFLQEQNKTKPEFNVRKVEGTLPPDVLVIHQSKYKCGMKNHHPEQQSSLLNLSSTTPTHQESMNTGTLASLRGRARRSKGKNKHSKRALLVCQ

SEQ ID NO: 64 - protein, 370 aa, Homo sapiens
MEILMTVSKFASICTMGANASALEKEIGPEQFPVNEHYFGLVNFGNTCYCNSVLQALYFCRPFREKVLAYKSQPRKKESLLTCLADLFHSIATQKKKVGVIPPKKFITRLRKENELFDNYMQQDAHEFLNYLLNTIADILQEERKQEKQNGRLPNGNIDNENNNSTPDPTWVHEIFQGTLTNETRCLTCETISSKDEDFLDLSVDVEQNTSITHCLRGFSNTETLCSEYKYYCEECRSKQEAHKRMKVKKLPMILALHLKRFKYMDQLHRYTKLSYRVVFPLELRLFNTSGDATNPDRMYDLVAVVVHCGSGPNRGHYIAIVKSHDFWLLFDDDIVEKIDAQAIEEFYGLTSDISKNSESGYILFYQSRD

SEQ ID NO: 65 - protein, 530 aa, Homo sapiens
MEEDSLYLGGEWQFNHFSKLTSSRPDAAFAEIQRTSLPEKSPLSCETRVDLCDDLAPVARQLAPREKLPLSNRRPAAVGAGLQNMGNTCYVNASLQCLTYTPPLANYMLSREHSQTCHRHKGCMLCTMQAHITRALHNPGHVIQPSQALAAGFHRGKQEDAHEFLMFTVDAMKKACLPGHKQVDHHSKDTTLIHQIFGGYWRSQIKCLHCHGISDTFDPYLDIALDIQAAQSVQQALEQLVKPEELNGENAYHCGVCLQRAPASKMLTLLTSAKVLILVLKRFSDVTGNKIAKNVQYPECLDMQPYMSQPNTGPLVYVLYAVLVHAGWSCHNGHYFSYVKAQEGQWYKMDDAEVTASSITSVLSQQAYVLFYIQKSEWERHSESVSRGREPRALGAEDTDRRATQGELKRDHPCLQAPELDEHLVERATQESTLDHWKFLQEQNKTKPEFNVRKVEGTLPPDVLVIHQSKYKCGMKNHHPEQQSSLLKLSSTTPTHQESMNTGTLASLRGRARRSKGKNKHSKRALLVCQ

SEQ ID NO: 66 - protein, 914 aa, Homo sapiens
MGDSRDLCPHLDSIGEVTKEDLLLKSKGTCQSCGVTGPNLWACLQVACPYVGCGESFADHSTIHAQAKKHNLTVNLTTFRLWCYACEKEVFLEQRLAAPLLGSSSKFSEQDSPPPSHPLKAVPIAVADEGESESEDDDLKPRGLTGMKNLGNSCYMNAALQALSNCPPLTQFFLECGGLVRTDKKPALCKSYQKLVSEVWHKKRPSYVVPTSLSHGIKLVNPMFRGYAQQDTQEFLRCLMDQLHEELKEPVVATVALTEARDSDSSDTDEKREGDRSPSEDEFLSCDSSSDRGEGDGQGRGGGSSQAETELLIPDEAGRAISEKERMKDRKFSWGQQRTNSEQVDEDADVDTAMAALDDQPAEAQPPSPRSSSPCRTPEPDNDAHLRSSSRPCSPVHHHEGHAKLSSSPPRASPVRMAPSYVLKKAQVLSAGSRRRKEQRYRSVISDIFDGSILSLVQCLTCDRVSTTVETFQDLSLPIPGKEDLAKLHSAIYQNVPAKPGACGDSYAAQGWLAFIVEYIRRFVVSCTPSWFWGPVVTLEDCLAAFFAADELKGDNMYSCERCKKLRNGVKYCKVLRLPEILCIHLKRFRHEVMYSFKINSHVSFPLEGLDLRPFLAKECTSQITTYDLLSVICHHGTAGSGHYIAYCQNVINGQWYEFDDQYVTEVHETVVQNAEGYVLFYRKSSEEAMRERQQVVSLAAMREPSLLRFYVSREWLNKFNTFAEPGPITNQTFLCSHGGIPPHKYHYIDDLVVILPQNVWEHLYNRFGGGPAVNHLYVCSICQVEIEALAKRRRIEIDTFIKLNKAFQAEESPGVIYCISMQWFREWEAFVKGKDNEPPGPIDNSRIAQVKGSGHVQLKQGADYGQISEETWTYLNSLYGGGPEIAIRQSVAQPLGPENLHGEQKIEAETRAV

SEQ ID NO: 67 - protein, 366 aa, Homo sapiens
MTVRNIASICNMGTNASALEKDIGPEQFPINEHYFGLVNFGNTCYCNSVLQALYFCRPFRENVLAYKAQQKKKENLLTCLADLFHSIATQKKKVGVIPPKKFISRLRKENDLFDNYMQQDAHEFLNYLLNTIADILQEEKKQEKQNGKLKNGNMNEPAENNKPELTWVHEIFQGTLTNETRCLNCETVSSKDEDFLDLSVDVEQNTSITHCLRDFSNTETLCSEQKYYCETCCSKQEAQKRMRVKKLPMILALHLKRFKYMEQLHRYTKLSYRVVFPLELRLFNTSSDAVNLDRMYDLVAVVVHCGSGPNRGHYITIVKSHGFWLLFDDDIVEKIDAQAIEEFYGLTSDISKNSESGYILFYQSRE

SEQ ID NO: 68 - protein, 956 aa, Homo sapiens
MSSGLWSQEKVTSPYWEERIFYLLLQECSVTDKQTQKLLKVPKGSIGQYIQDRSVGHSRIPSAKGKKNQIGLKILEQPHAVLFVDEKDVVEINEKFTELLLAITNCEERFSLFKNRNRLSKGLQIDVGCPVKVQLRSGEEKFPGVVRFRGPLLAERTVSGIFFGVELLEEGRGQGFTDGVYQGKQLFQCDEDCGVFVALDKLELIEDDDTALESDYAGPGDTMQVELPPLEINSRVSLKVGETIESGTVIFCDVLPGKESLGYFVGVDMDNPIGNWDGRFDGVQLCSFACVESTILLHINDIIPALSESVTQERRPPKLAFMSRGVGDKGSSSHNKPKATGSTSDPGNRNRSELFYTLNGSSVDSQPQSKSKNTWYIDEVAEDPAKSLTEISTDFDRSSPPLQPPPVNSLTTENRFHSLPFSLTKMPNTNGSIGHSPLSLSAQSVMEELNTAPVQESPPLAMPPGNSHGLEVGSLAEVKENPPFYGVIRWIGQPPGLNEVLAGLELEDECAGCTDGTFRGTRYFTCALKKALFVKLKSCRPDSRFASLQPVSNQIERCNSLAFGGYLSEVVEENTPPKMEKEGLEIMIGKKKGIQGHYNSCYLDSTLFCLFAFSSVLDTVLLRPKEKNDVEYYSETQELLRTEIVNPLRIYGYVCATKIMKLRKILEKVEAASGFTSEEKDPEEFLNILFHHILRVEPLLKIRSAGQKVQDCYFYQIFMEKNEKVGVPTIQQLLEWSFINSNLKFAEAPSCLIIQMPRFGKDFKLFKKIFPSLELNITDLLEDTPRQCRICGGLAMYECRECYDDPDISAGKIKQFCKTCNTQVHLHPKRLNHKYNPVSLPKDLPDWDWRHGCIPCQNMELFAVLCIETSHYVAFVKYGKDDSAWLFFDSMADRDGGQNGFNIPQVTPCPEVGEYLKMSLEDLHSLDSRRIQGCARRLLCDAYMCMYQSPTMSLYK

SEQ ID NO: 69 - protein, 823 aa, Homo sapiens
MGKKRTKGKTVPIDDSSETLEPVCRHIRKGLEQGNLKKALVNVEWNICQDCKTDNKVKDKAEEETEEKPSVWLCLKCGHQGCGRNSQEQHALKHYLTPRSEPHCLVLSLDNWSVWCYVCDNEVQYCSSNQLGQVVDYVRKQASITTPKPAEKDNGNIELENKKLEKESKNEQEREKKENMAKENPPMNSPCQITVKGLSNLGNTCFFNAVMQNLSQTPVLRELLKEVKMSGTIVKIEPPDLALTEPLEINLEPPGPLTLAMSQFLNEMQETKKGVVTPKELFSQVCKKAVRFKGYQQQDSQELLRYLLDGMRAEEHQRVSKGILKAFGNSTEKLDEELKNKVKDYEKKKSMPSFVDRIFGGELTSMIMCDQCRTVSLVHESFLDLSLPVLDDQSGKKSVNDKNLKKTVEDEDQDSEEEKDNDSYIKERSDIPSGTSKHLQKKAKKQAKKQAKNQRRQQKIQGKVLHLNDICTIDHPEDSEYEAEMSLQGEVNIKSNHISQEGVMHKEYCVNQKDLNGQAKMIESVTDNQKSTEEVDMKNINMDNDLEVLTSSPTRNLNGAYLTEGSNGEVDISNGFKNLNLNAALHPDEINIEILNDSHTPGTKVYEVVNEDPETAFCTLANREVFNTDECSIQHCLYQFTRNEKLRDANKLLCEVCTRRQCNGPKANIKGERKHVYTNAKKQMLISLAPPVLTLHLKRFQQAGFNLRKVNKHIKFPEILDLAPFCTLKCKNVAEENTRVLYSLYGVVEHSGTMRSGHYTAYAKARTANSHLSNLVLHGDIPQDFEMESKGQWFHISDTHVQAVPTTKVLNSQAYLLFYERIL

SEQ ID NO: 70 - protein, 1137 aa, Homo sapiens
MKCVFVTVGTTSFDDLIACVSAPDSLQKIESLGYNRLILQIGRGTVVPEPFSTESFTLDVYRYKDSLKEDIQKADLVISHAGAGSCLETLEKGKPLVVVINEKLMNNHQLELAKQLHKEGHLFYCTCRVLTCPGQAKSIASAPGKCQDSAALTSTAFSGLDFGLLSGYLHKQALVTATHPTCTLLFPSCHAFFPLPLTPTLYKMHKGWKNYCSQKSLNEASMDEYLGSLGLFRKLTAKDASCLFRAISEQLFCSQVHHLEIRKACVSYMRENQQTFESYVEGSFEKYLERLGDPKESAGQLEIRALSLIYNRDFILYRFPGKPPTYVTDNGYEDKILLCYSSSGHYDSVYSKQFQSSAAVCQAVLYEILYKDVFVVDEEELKTAIKLFRSGSKKNRNNAVTGSEDAHTDYKSSNQNRMEEWGACYNAENIPEGYNKGTEETKSPENPSKMPFPYKVLKALDPEIYRNVEFDVWLDSRKELQKSDYMEYAGRQYYLGDKCQVCLESEGRYYNAHIQEVGNENNSVTVFIEELAEKHVVPLANLKPVTQVMSVPAWNAMPSRKGRGYQKMPGGYVPEIVISEMDIKQQKKMFKKIRGKEVYMTMAYGKGDPLLPPRLQHSMHYGHDPPMHYSQTAGNVMSNEHFHPQHPSPRQGRGYGMPRNSSRFINRHNMPGPKVDFYPGPGKRCCQSYDNFSYRSRSFRRSHRQMSCVNKESQYGFTPGNGQMPRGLEETITFYEVEEGDETAYPTLPNHGGPSTMVPATSGYCVGRRGHSSGKQTLNLEEGNGQSENGRYHEEYLYRAEPDYETSGVYSTTASTANLSLQDRKSCSMSPQDTVTSYNYPQKMMGNIAAVAASCANNVPAPVLSNGAAANQAISTTSVSSQNAIQPLFVSPPTHGRPVIASPSYPCHSAIPHAGASLPPPPPPPPPPPPPPPPPPPPPPPPPPPALDVGETSNLQPPPPLPPPPYSCDPSGSDLPQDTKVLQYYFNLGLQCYYHSYWHSMVYVPQMQQQLHVENYPVYTEPPLVDQTVPQCYSEVRREDGIQAEASANDTFPNADSSSVPHGAVYYPVMSDPYGQPPLPGFDSCLPVVPDYSCVPPWHPVGTAYGGSSQIHGAINPGPIGCIAPSPPASHYVPQGM

SEQ ID NO: 71 - protein, 348 aa, Homo sapiens
MFGPAKGRHFGVHPAPGFPGGVSQQAAGTKAGPAGAWPVGSRTDTMWRLRCKAKDGTHVLQGLSSRTRVRELQGQIAAITGIAPGGQRILVGYPPECLDLSNGDTILEDLPIQSGDMLIIEEDQTRPRSSPAFTKRGASSYVRETLPVLTRTVVPADNSCLFTSVYYVVEGGVLNPACAPEMRRLIAQIVASDPDFYSEAILGKTNQEYCDWIKRDDTWGGAIEISILSKFYQCEICVVDTQTVRIDRFGEDAGYTKRVLLIYDGIHYDPLQRNFPDPDTPPLTIFSSNDDIVLVQALELADEARRRRQFTDVNRFTLRCMVCQKGLTGQAEAREHAKETGHTNFGEV

SEQ ID NO: 72 - protein, 481 aa, Homo sapiens
MQLYSSVCTHYPAGAPGPTAAAPAPPAAATPFKVSLQPPGAAGAAPEPETGECQPAAAAEHREAAAVPAAKMPAFSSCFEVVSGAAAPASAAAGPPGASCKPPLPPHYTSTAQITVRALGADRLLLHGPDPVPGAAGSAAAPRGRCLLLAPAPAAPVPPRRGSSAWLLEELLRPDCPEPAGLDATREGPDRNFRLSEHRQALAAAKHRGPAATPGSPDPGPGPWGEEHLAERGPRGWERGGDRCDAPGGDAARRPDPEAEAPPAGSIEAAPSSAAEPVIVSRSDPRDEKLALYLAEVEKQDKYLRQRNKYRFHIIPDGNCLYRAVSKTVYGDQSLHRELREQTVHYIADHLDHFSPLIEGDVGEFIIAAAQDGAWAGYPELLAMGQMLNVNIHLTTGGRLESPTVSTMIHYLGPEDSLRPSIWLSWLSNGHYDAVFDHSYPNPEYDNWCKQTQVQRKRDEELAKSMAISLSKMYIEQNACS

SEQ ID NO: 73 - protein, 293 aa, Homo sapiens
MEAVLTEELDEEEQLLRRHRKEKKELQAKIQGMKNAVPKNDKKRRKQLTEDVAKLEKEMEQKHREELEQLKLTTKENKIDSVAVNISNLVLENQPPRISKAQKRREKKAALEKEREERIAEAEIENLTGARHMESEKLAQILAARQLEIKQIPSDGHCMYKAIEDQLKEKDCALTVVALRSQTAEYMQSHVEDFLPFLTNPNTGDMYTPEEFQKYCEDIVNTAAWGGQLELRALSHILQTPIEIIQADSPPIIVGEEYSKKPLILVYMRHAYGLGEHYNSVTRLVNIVTENCS

SEQ ID NO: 74 - protein, 288 aa, Homo sapiens
MDDPKSEQQRILRRHQRERQELQAQIRSLKNSVPKTDKTKRKQLLQDVARMEAEMAQKHRQELEKFQDDSSIESVVEDLAKMNLENRPPRSSKAHRKRERMESEERERQESIFQAEMSEHLAGFKREEEEKLAAILGARGLEMKAIPADGHCMYRAIQDQLVFSVSVEMLRCRTASYMKKHVDEFLPFFSNPETSDSFGYDDFMIYCDNIVRTTAWGGQLELRALSHVLKTPIEVIQADSPTLIIGEEYVKKPIILVYLRYAYSLGEHYNSVTPLEAGAAGGVLPRLL

SEQ ID NO: 75 - protein, 271 aa, Homo sapiens
MAAEEPQQQKQEPLGSDSEGVNCLAYDEAIMAQQDRIQQEIAVQNPLVSERLELSVLYKEYAEDDNIYQQKIKDLHKKYSYIRKTRPDGNCFYRAFGFSHLEALLDDSKELQRFKAVSAKSKEDLVSQGFTEFTIEDFHNTFMDLIEQVEKQTSVADLLASFNDQSTSDYLVVYLRLLTSGYLQRESKFFEHFIEGGRTVKEFCQQEVEPMCKESDHIHIIALAQALSVSIQVEYMDRGEGGTTNPHIFPEGSEPKVYLLYRPGHYDILYK

SEQ ID NO: 76 - protein, 926 aa, Homo sapiens
MVSSVLPNPTSAECWAALLHDPMTLDMDAVLSDFVRSTGAEPGLARDLLEGKNWDLTAALSDYEQLRQVHTANLPHVFNEGRGPKQPEREPQPGHKVERPCLQRQDDIAQEKRLSRGISHASSAIVSLARSHVASECNNEQFPLEMPIYTFQLPDLSVYSEDFRSFIERDLIEQATMVALEQAGRLNWWSTVCTSCKRLLPLATTGDGNCLLHAASLGMWGFHDRDLVLRKALYTMMRTGAEREALKRRWRWQQTQQNKEEEWEREWTELLKLASSEPRTHFSKNGGTGGGVDNSEDPVYESLEEFHVFVLAHILRRPIVVVADTMLRDSGGEAFAPIPFGGIYLPLEVPPNRCHCSPLVLAYDQAHFSALVSMEQRDQQREQAVIPLTDSEHKLLPLHFAVDPGKDWEWGKDDNDNARLAHLILSLEAKLNLLHSYMNVTWIRIPSETRAPLAQPESPTASAGEDVQSLADSLDSDRDSVCSNSNSNNGKNGKDKEKEKQRKEKDKTRADSVANKLGSFSKTLGIKLKKNMGGLGGLVHGKMGRANSANGKNGDSAERGKEKKAKSRKGSKEESGASASTSPSEKTTPSPTDKAAGASPAEKGGGPRGDAWKYSTDVKLSLNILRAAMQGERKFIFAGLLLTSHRHQFHEEMIGYYLTSAQERFSAEQEQRRRDAATAAAAAAAAAAATAKRPPRRPETEGVPVPERASPGPPTQLVLKLKERPSPGPAAGRAARAAAGGTASPGGGARRASASGPVPGRSPPAPARQSVIHVQASGARDEACAPAVGALRPCATYPQQNRSLSSQSYSPARAAALRTVNTVESLARAVPGALPGAAGTAGAAEHKSQTYTNGFGALRDGLEFADADAPTARSNGECGRGGPGPVQRRCQRENCAFYGRAETEHYCSYCYREELRRRREARGARP

SEQ ID NO: 77 - protein, 1113 aa, Homo sapiens
MEAAVGVPDGGDQGGAGPREDATPMDAYLRKLGLYRKLVAKDGSCLFRAVAEQVLHSQSRHVEVRMACIHYLRENREKFEAFIEGSFEEYLKRLENPQEWVGQVEISALSLMYRKDFIIYREPNVSPSQVTENNFPEKVLLCFSNGNHYDIVYPIKYKESSAMCQSLLYELLYEKVFKTDVSKIVMELDTLEVADEDNSEISDSEDDSCKSKTAAAAADVNGFKPLSGNEQLKNNGNSTSLPLSRKVLKSLNPAVYRNVEYEIWLKSKQAQQKRDYSIAAGLQYEVGDKCQVRLDHNGKFLNADVQGIHSENGPVLVEELGKKHTSKNLKAPPPESWNTVSGKKMKKPSTSGQNFHSDVDYRGPKNPSKPIKAPSALPPRLQHPSGVRQHAFSSHSSGSQSQKFSSEHKNLSRTPSQIIRKPDRERVEDFDHTSRESNYFGLSPEERREKQAIEESRLLYEIQNRDEQAFPALSSSSVNQSASQSSNPCVQRKSSHVGDRKGSRRRMDTEERKDKDSIHGHSQLDKRPEPSTLENITDDKYATVSSPSKSKKLECPSPAEQKPAEHVSLSNPAPLLVSPEVHLTPAVPSLPATVPAWPSEPTTFGPTGVPAPIPVLSVTQTLTTGPDSAVSQAHLTPSPVPVSIQAVNQPLMPLPQTLSLYQDPLYPGFPCNEKGDRAIVPPYSLCQTGEDLPKDKNILRFFFNLGVKAYSCPMWAPHSYLYPLHQAYLAACRMYPKVPVPVYPHNPWFQEAPAAQNESDCTCTDAHFPMQTEASVNGQMPQPEIGPPTFSSPLVIPPSQVSESHGQLSYQADLESETPGQLLHADYEESLSGKNMFPQSFGPNPFLGPVPIAPPFFPHVWYGYPFQGFIENPVMRQNIVLPSDEKGELDLSLENLDLSKDCGSVSTVDEFPEARGEHVHSLPEASVSSKPDEGRTEQSSQTRKADTALASIPPVAEGKAHPPTQILNRERETVPVELEPKRTIQSLKEKTEKVKDPKTAADVVSPGANSVDSRVQRPKEESSEDENEVSNILRSGRSKQFYNQTYGSRKYKSDWGYSGRGGYQHVRSEESWKGQPSRSRDEGYQYHRNVRGRPFRGDRRRSGMGDGHRGQHT

SEQ ID NO: 78 - protein, 234 aa, Homo sapiens
MSETSFNLISEKCDILSILRDHPENRIYRRKIEELSKRFTAIRKTKGDGNCFYRALGYSYLESLLGKSREIFKFKERVLQTPNDLLAAGFEEHKFRNFFNAFYSVVELVEKDGSVSSLLKVFNDQSASDHIVQFLRLLTSAFIRNRADFFRHFIDEEMDIKDFCTHEVEPMATECDHIQITALSQALSIALQVEYVDEMDTALNHHVFPEAATPSVYLLYKTSHYNILYAADKH

SEQ ID NO: 79 - protein, 398 aa, Homo sapiens
MSRKQAAKSRPGSGSRKAEAERKRDERAARRALAKERRNRPESGGGGGCEEEFVSFANQLQALGLKLREVPGDGNCLFRALGDQLEGHSRNHLKHRQETVDYMIKQREDFEPFVEDDIPFEKHVASLAKPGTFAGNDAIVAFARNHQLNVVIHQLNAPLWQIRGTEKSSVRELHIAYRYGEHYDSVRRINDNSEAPAHLQTDFQMLHQDESNKREKIKTKGMDSEDDLRDEVEDAVQKVCNATGCSDFNLIVQNLEAENYNIESAIIAVLRMNQGKRNNAEENLEPSGRVLKQCGPLWEEGGSGARIFGNQGLNEGRTENNKAQASPSEENKANKNQLAKVTNKQRREQQWMEKKKRQEERHRHKALESRGSHRDNNRSEAEANTQVTLVKTFAALNI

SEQ ID NO: 80 - protein, 843 aa, Homo sapiens
MTLDMDAVLSDFVRSTGAEPGLARDLLEGKNWDVNAALSDFEQLRQVHAGNLPPSFSEGSGGSRTPEKGFSDREPTRPPRPILQRQDDIVQEKRLSRGISHASSSIVSLARSHVSSNGGGGGSNEHPLEMPICAFQLPDLTVYNEDFRSFIERDLIEQSMLVALEQAGRLNWWVSVDPTSQRLLPLATTGDGNCLLHAASLGMWGFHDRDLMLRKALYALMEKGVEKEALKRRWRWQQTQQNKESGLVYTEDEWQKEWNELIKLASSEPRMHLGTNGANCGGVESSEEPVYESLEEFHVFVLAHVLRRPIVVVADTMLRDSGGEAFAPIPFGGIYLPLEVPASQCHRSPLVLAYDQAHFSALVSMEQKENTKEQAVIPLTDSEYKLLPLHFAVDPGKGWEWGKDDSDNVRLASVILSLEVKLHLLHSYMNVKWIPLSSDAQAPLAQPESPTASAGDEPRSTPESGDSDKESVGSSSTSNEGGRRKEKSKRDREKDKKRADSVANKLGSFGKTLGSKLKKNMGGLMHSKGSKPGGVGTGLGGSSGTETLEKKKKNSLKSWKGGKEEAAGDGPVSEKPPAESVGNGGSKYSQEVMQSLSILRTAMQGEGKFIFVGTLKMGHRHQYQEEMIQRYLSDAEERFLAEQKQKEAERKIMNGGIGGGPPPAKKPEPDAREEQPTGPPAESRAMAFSTGYPGDFTIPRPSGGGVHCQEPRRQLAGGPCVGGLPPYATFPRQCPPGRPYPHQDSIPSLEPGSHSKDGLHRGALLPPPYRVADSYSNGYREPPEPDGWAGGLRGLPPTQTKCKQPNCSFYGHPETNNFCSCCYREELRRREREPDGELLVHRF

SEQ ID NO: 81 - protein, 571 aa, Homo sapiens
MTILPKKKPPPPDADPANEPPPPGPMPPAPRRGGGVGVGGGGTGVGGGDRDRDSGVVGARPRASPPPQGPLPGPPGALHRWALAVPPGAVAGPRPQQASPPPCGGPGGPGGGPGDALGAAAAGVGAAGVVVGVGGAVGVGGCCSGPGHSKRRRQAPGVGAVGGGSPEREEVGAGYNSEDEYEAAAARIEAMDPATVEQQEHWFEKALRDKKGFIIKQMKEDGACLFRAVADQVYGDQDMHEVVRKHCMDYLMKNADYFSNYVTEDFTTYINRKRKNNCHGNHIEMQAMAEMYNRPVEVYQYSTGTSAVEPINTFHGIHQNEDEPIRVSYHRNIHYNSVVNPNKATIGVGLGLPSFKPGFAEQSLMKNAIKTSEESWIEQQMLEDKKRATDWEATNEAIEEQVARESYLQWLRDQEKQARQVRGPSQPRKASATCSSATAAASSGLEEWTSRSPRQRSSASSPEHPELHAELGMKPPSPGTVLALAKPPSPCAPGTSSQFSAGADRATSPLVSLYPALECRALIQQMSPSAFGLNDWDDDEILASVLAVSQQEYLDSMKKNKVHRDPPPDKS

SEQ ID NO: 82 - protein, 790 aa, Homo sapiens
MAEQVLPQALYLSNMRKAVKIRERTPEDIFKPTNGIIHHFKTMHRYTLEMFRTCQFCPQFREIIHKALIDRNIQATLESQKKLNWCREVRKLVALKTNGDGNCLMHATSQYMWGVQDTDLVLRKALFSTLKETDTRNFKFRWQLESLKSQEFVETGLCYDTRNWNDEWDNLIKMASTDTPMARSGLQYNSLEEIHIFVLCNILRRPIIVISDKMLRSLESGSNFAPLKVGGIYLPLHWPAQECYRYPIVLGYDSHHFVPLVTLKDSGPEIRAVPLVNRDRGRFEDLKVHFLTDPENEMKEKLLKEYLMVIEIPVQGWDHGTTHLINAAKLDEANLPKEINLVDDYFELVQHEYKKWQENSEQGRREGHAQNPMEPSVPQLSLMDVKCETPNCPFFMSVNTQPLCHECSERRQKNQNKLPKLNSKPGPEGLPGMALGASRGEAYEPLAWNPEESTGGPHSAPPTAPSPFLFSETTAMKCRSPGCPFTLNVQHNGFCERCHNARQLHASHAPDHTRHLDPGKCQACLQDVTRTFNGICSTCFKRTTAEASSSLSTSLPPSCHQRSKSDPSRLVRSPSPHSCHRAGNDAPAGCLSQAARTPGDRTGTSKCRKAGCVYFGTPENKGFCTLCFIEYRENKHFAAASGKVSPTASRFQNTIPCLGRECGTLGSTMFEGYCQKCFIEAQNQRFHEAKRTEEQLRSSQRRDVPRTTQSTSRPKCARASCKNILACRSEELCMECQHPNQRMGPGAHRGEPAPEDPPKQRCRAPACDHFGNAKCNGYCNECFQFKQMYG

SEQ ID NO: 83 - protein, 708 aa, Homo sapiens
MSERGIKWACEYCTYENWPSAIKCTMCRAQRPSGTIITEDPFKSGSSDVGRDWDPSSTEGGSSPLICPDSSARPRVKSSYSMENANKWSCHMCTYLNWPRAIRCTQCLSQRRTRSPTESPQSSGSGSRPVAFSVDPCEEYNDRNKLNTRTQHWTCSVCTYENWAKAKRCVVCDHPRPNNIEAIELAETEEASSIINEQDRARWRGSCSSGNSQRRSPPATKRDSEVKMDFQRIELAGAVGSKEELEVDFKKLKQIKNRMKKTDWLFLNACVGVVEGDLAAIEAYKSSGGDIARQLTADEVRLLNRPSAFDVGYTLVHLAIRFQRQDMLAILLTEVSQQAAKCIPAMVCPELTEQIRREIAASLHQRKGDFACYFLTDLVTFTLPADIEDLPPTVQEKLFDEVLDRDVQKELEEESPIINWSLELATRLDSRLYALWNRTAGDCLLDSVLQATWGIYDKDSVLRKALHDSLHDCSHWFYTRWKDWESWYSQSFGLHFSLREEQWQEDWAFILSLASQPGASLEQTHIFVLAHILRRPIIVYGVKYYKSFRGETLGYTRFQGVYLPLLWEQSFCWKSPIALGYTRGHFSALVAMENDGYGNRGAGANLNTDDDVTITFLPLVDSERKLLHVHFLSAQELGNEEQQEKLLREWLDCCVTEGGVLVAMQKSSRRRNHPLVTQMVEKWLDRYRQIRPCTSLSDGEEDEDDEDE

SEQ ID NO: 84 - protein, 1222 aa, Homo sapiens
MSQPPPPPPPLPPPPPPPEAPQTPSSLASAAASGGLLKRRDRRILSGSCPDPKCQARLFFPASGSVSIECTECGQRHEQQQLLGVEEVTDPDVVLHNLLRNALLGVTGAPKKNTELVKVMGLSNYHCKLLSPILARYGMDKQTGRAKLLRDMNQGELFDCALLGDRAFLIEPEHVNTVGYGKDRSGSLLYLHDTLEDIKRANKSQECLIPVHVDGDGHCLVHAVSRALVGRELFWHALRENLKQHFQQHLARYQALFHDFIDAAEWEDIINECDPLFVPPEGVPLGLRNIHIFGLANVLHRPIILLDSLSGMRSSGDYSATFLPGLIPAEKCTGKDGHLNKPICIAWSSSGRNHYIPLVGIKGAALPKLPMNLLPKAWGVPQDLIKKYIKLEEDGGCVIGGDRSLQDKYLLRLVAAMEEVFMDKHGIHPSLVADVHQYFYRRTGVIGVQPEEVTAAAKKAVMDNRLHKCLLCGALSELHVPPEWLAPGGKLYNLAKSTHGQLRTDKNYSFPLNNLVCSYDSVKDVLVPDYGMSNLTACNWCHGTSVRKVRGDGSIVYLDGDRTNSRSTGGKCGCGFKHFWDGKEYDNLPEAFPITLEWGGRVVRETVYWFQYESDSSLNSNVYDVAMKLVTKHFPGEFGSEILVQKVVHTILHQTAKKNPDDYTPVNIDGAHAQRVGDVQGQESESQLPTKIILTGQKTKTLHKEELNMSKTERTIQQNITEQASVMQKRKTEKLKQEQKGQPRTVSPSTIRDGPSSAPATPTKAPYSPTTSKEKKIRITTNDGRQSMVTLKSSTTFFELQESIAREFNIPPYLQCIRYGFPPKELMPPQAGMEKEPVPLQHGDRITIEILKSKAEGGQSAAAHSAHTVKQEDIAVTGKLSSKELQEQAEKEMYSLCLLATLMGEDVWSYAKGLPHMFQQGGVFYSIMKKTMGMADGKHCTFPHLPGKTFVYNASEDRLELCVDAAGHFPIGPDVEDLVKEAVSQVRAEATTRSRESSPSHGLLKLGSGGVVKKKSEQLHNVTAFQGKGHSLGTASGNPHLDPRARETSVVRKHNTGTDFSNSSTKTEPSVFTASSSNSELIRIAPGVVTMRDGRQLDPDLVEAQRKKLQEMVSSIQASMDRHLRDQSTEQSPSDLPQRKTEVVSSSAKSGSLQTGLPESFPLTGGTENLNTETTDGCVADALGAAFATRSKAQRGNSVEELEEMDSQDAEMTNTTEPMDHS

SEQ ID NO: 85 - protein, 230 aa, Homo sapiens
MEGQRWLPLEANPEVTNQFLKQLGLHPNWQFVDVYGMDPELLSMVPRPVCAVLLLFPITEKYEVFRTEEEEKIKSQGQDVTSSVYFMKQTISNACGTIGLIHAIANNKDKMHFESGSTLKKFLEESVSMSPEERARYLENYDAIRVTHETSAHEGQTEAPSIDEKVDLHFIALVHVDGHLYELDGRKPFPINHGETSDETLLEDAIEVCKKFMERDPDELRFNAIALSAA

SEQ ID NO: 86 - protein, 223 aa, Homo sapiens [sequence omitted]

SEQ ID NO: 87 - protein, 329 aa, Homo sapiens
MTGNAGEWCLMESDPGVFTELIKGFGCRGAQVEEIWSLEPENFEKLKPVHGLIFLFKWQPGEEPAGSVVQDSRLDTIFFAKQVINNACATQAIVSVLLNCTHQDVHLGETLSEFKEFSQSFDAAMKGLALSNSDVIRQVHNSFARQQMFEFDTKTSAKEEDAFHFVSYVPVNGRLYELDGLREGPIDLGACNQDDWISAVRPVIEKRIQKYSEGEIRFNLMAIVSDRKMIYEQKIAELQRQLAEEEPMDTDQGNSMLSAIQSEVAKNQMLIEEEVQKLKRYKIENIRRKHNYLPFIMELLKTLAEHQQLIPLVEKAKEKQNAKKAQETK

SEQ ID NO: 88 - protein, 361 aa, Homo sapiens
MESIFHEKQEGSLCAQHCLNNLLQGEYFSPVELSSIAHQLDEEERMRMAEGGVTSEDYRTFLQQPSGNMDDSGFFSIQVISNALKVWGLELILFNSPEYQRLRIDPINERSFICNYKEHWFTVRKLGKQWFNLNSLLTGPELISDTYLALFLAQLQQEGYSIFVVKGDLPDCEADQLLQMIRVQQMHRPKLIGEELAQLKEQRVHKTDLERVLEANDGSGMLDEDEEDLQRALALSRQEIDMEDEEADLRRAIQLSMQGSSRNISQDMTQTSGTNLTSEELRKRREAYFEKQQQKQQQQQQQQQQGDLSGQSSHPCERPATSSGALGSDLGDAMSEEDMLQAAVTMSLETVRNDLKTEGKK

SEQ ID NO: 89 - protein, 188 aa, Homo sapiens
MSQAPGAQPSPPTVYHERQRLELCAVHALNNVLQQQLFSQEAADEICKRLAPDSRLNPHRSLLGTGNYDVNVIMAALQGLGLAAVWWDRRRPLSQLALPQVLGLILNLPSPVSLGLLSLPLRRRHWVALRQVDGVYYNLDSKLRAPEALGDEDGVRAFLAAALAQGLCEVLLVVTKEVEEKGSWLRTD

SEQ ID NO: 90 - protein, 202 aa, Homo sapiens
MSCVPWKGDKAKSESLELPQAAPPQIYHEKQRRELCALHALNNVFQDSNAFTRDTLQEIFQRLSPNTMVTPHKKSMLGNGNYDVNVIMAALQTKGYEAVWWDKRRDVGVIALTNVMGFIMNLPSSLCWGPLKLPLKRQHWICVREVGGAYYNLDSKLKMPEWIGGESELRKFLKHHLRGKNCELLLVVPEEVEAHQSWRTDV

SEQ ID NO: 91 - protein, 355 aa, Homo sapiens
MDFIFHEKQEGFLCAQHCLNNLLQGEYFSPVELASIAHQLDEEERMRMAEGGVTSEEYLAFLQQPSENMDDTGFFSIQVISNALKFWGLEIIHFNNPEYQKLGIDPINERSFICNYKQHWFTIRKFGKHWFNLNSLLAGPELISDTCLANFLARLQQQAYSVFVVKGDLPDCEADQLLQIISVEEMDTPKLNGKKLVKQKEHRVYKTVLEKVSEESDESGTSDQDEEDFQRALELSRQETNREDEHLRSTIELSMQGSSGNTSQDLPKTSCVTPASEQPKKIKEDYFEKHQQEQKQQQQQSDLPGHSSYLHERPTTSSRAIESDLSDDISEGTVQAAVDTILEIMRKNLKIKGEK

SEQ ID NO: 92 - protein, 445 aa, Homo sapiens
MSELTKELMELVWGTKSSPGLSDTIFCRWTQGFVFSESEGSALEQFEGGPCAVIAPVQAFLLKKLLFSSEKSSWRDCSEEEQKELLCHTLCDILESACCDHSGSYCLVSWLRGKTTEETASISGSPAESSCQVEHSSALAVEELGFERFHALIQKRSFRSLPELKDAVLDQYSMWGNKFGVLLFLYSVLLTKGIENIKNEIEDASEPLIDPVYGHGSQSLINLLLTGHAVSNVWDGDRECSGMKLLGIHEQAAVGFLTLMEALRYCKVGSYLKSPKFPIWIVGSETHLTVFFAKDMALVAPEAPSEQARRVFQTYDPEDNGFIPDSLLEDVMKALDLVSDPEYINLMKNKLDPEGLGIILLGPFLQEFFPDQGSSGPESFTVYHYNGLKQSNYNEKVMYVEGTAVVMGFEDPMLQTDDTPIKRCLQTKWPYIELLWTTDRSPSLN

SEQ ID NO: 93 - protein, 469 aa, Homo sapiens
MEYHQPEDPAPGKAGTAEAVIPENHEVLAGPDEHPQDTDARDADGEAREREPADQALLPSQCGDNLESPLPEASSAPPGPTLGTLPEVETIRACSMPQELPQSPRTRQPEPDFYCVKWIPWKGEQTPIITQSTNGPCPLLAIMNILFLQWKVKLPPQKEVITSDELMAHLGNCLLSIKPQEKSEGLQLNFQQNVDDAMTVLPKLATGLDVNVRFTGVSDFEYTPECSVFDLLGIPLYHGWLVDPQSPEAVRAVGKLSYNQLVERIITCKHSSDTNLVTEGLIAEQFLETTAAQLTYHGLCELTAAAKEGELSVFFRNNHFSTMTKHKSHLYLLVTDQGFLQEEQVVWESLHNVDGDSCFCDSDFHLSHSLGKGPGAEGGSGSPETQLQVDQDYLIALSLQQQQPRGPLGLTDLELAQQLQQEEYQQQQAAQPVRMRTRVLSLQGRGATSGRPAGERRQRPKHESDCILL

SEQ ID NO: 94 - protein, 621 aa, Homo sapiens
MESSPESLQPLEHGVAAGPASGTGSSQEGLQETRLAAGDGPGVWAAETSGGNGLGAAAARRSLPDSASPAGSPEVPGPCSSSAGLDLKDSGLESPAAAEAPLRGQYKVTASPETAVAGVGHELGTAGDAGARPDLAGTCQAELTAAGSEEPSSAGGLSSSCSDPSPPGESPSLDSLESFSNLHSFPSSCEFNSEEGAENRVPEEEEGAAVLPGAVPLCKEEEGEETAQVLAASKERFPGQSVYHIKWIQWKEENTPIITQNENGPCPLLAILNVLLLAWKVKLPPMMEIITAEQLMEYLGDYMLDAKPKEISEIQRLNYEQNMSDAMAILHKLQTGLDVNVRFTGVRVFEYTPECIVFDLLDIPLYHGWLVDPQIDDIVKAVGNCSYNQLVEKIISCKQSDNSELVSEGFVAEQFLNNTATQLTYHGLCELTSTVQEGELCVFFRNNHFSTMTKYKGQLYLLVTDQGFLTEEKVVWESLHNVDGDGNFCDSEFHLRPPSDPETVYKGQQDQIDQDYLMALSLQQEQQSQEINWEQIPEGISDLELAKKLQEEEDRRASQYYQEQEQAAAAAAAASTQAQQGQPAQASPSSGRQSGNSERKRKEPREKDKEKEKEKNSCVIL

SEQ ID NO: 95 - protein, 757 aa, Homo sapiens
MDSLFVEEVAASLVREFLSRKGLKKTCVTMDQERPRSDLSINNRNDLRKVLHLEFLYKENKAKENPLKTSLELITRYFLDHFGNTANNFTQDTPIPALSVPKKNNKVPSRCSETTLVNIYDLSDEDAGWRTSLSETSKARHDNLDGDVLGNFVSSKRPPHKSKPMQTVPGETPVLTSAWEKIDKLHSEPSLDVKRMGENSRPKSGLIVRGMMSGPIASSPQDSFHRHYLRRSSPSSSSTQPQEESRKVPELFVCTQQDILASSNSSPSRTSLGQLSELTVERQKTTASSPPHLPSKRLPPWDRARPRDPSEDTPAVDGSTDTDRMPLKLYLPGGNSRMTQERLERAFKRQGSQPAPVRKNQLLPSDKVDGELGALRLEDVEDELIREEVILSPVPSVLKLQTASKPIDLSVAKEIKTLLFGSSFCCFNEEWKLQSFSFSNTASLKYGIVQNKGGPCGVLAAVQGCVLQKLLFEGDSKADCAQGLQPSDAHRTRCLVLALADIVWRAGGRERAVVALASRTQQFSPTGKYKADGVLETLTLHSLTCYEDLVTFLQQSIHQFEVGPYGCILLTLSAILSRSTELIRQDFDVPTSHLIGAHGYCTQELVNLLLTGKAVSNVFNDVVELDSGDGNITLLRGIAARSDIGFLSLFEHYNMCQVGCFLKTPRFPIWVVCSESHFSILFSLQPGLLRDWRTERLFDLYYYDGLANQQEQIRLTIDTTQTISEDTDNDLVPPLELCIRTKWKGASVNWNGSDPIL

SEQ ID NO: 96 - protein, 424 aa, Homo sapiens
MSDHGDVSLPPEDRVRALSQLGSAVEVNEDIPPRRYFRSGVEIIRMASIYSEEGNIEHAFILYNKYITLFIEKLPKHRDYKSAVIPEKKDTVKKLKEIAFPKAEELKAELLKRYTKEYTEYNEEKKKEAEELARNMAIQQELEKEKQRVAQQKQQQLEQEQFHAFEEMIRNQELEKERLKIVQEFGKVDPGLGGPLVPDLEKPSLDVFPTLTVSSIQPSDCHTTVRPAKPPVVDRSLKPGALSNSESIPTIDGLRHVVVPGRLCPQFLQLASANTARGVETCGILCGKLMRNEFTITHVLIPKQSAGSDYCNTENEEELFLIQDQQGLITLGWIHTHPTQTAFLSSVDLHTHCSYQMMLPESVAIVCSPKFQETGFFKLTDHGLEEISSCRQKGFHPHSKDPPLFCSCSHVTVVDRAVTITDLR

SEQ ID NO: 97 - protein, 471 aa, Homo sapiens
MAAPEPLSPAGGAGEEAPEEDEDEAEAEDPERPNAGAGGGRSGGGGSSVSGGGGGGGAGAGGCGGPGGALTRRAVTLRVLLKDALLEPGAGVLSIYYLGKKFLGDLQPDGRIMWQETGQTFNSPSAWATHCKKLVNPAKKSGCGWASVKYKGQKLDKYKATWLRLHQLHTPATAADESPASEGEEEELLMEEEEEDVLAGVSAEDKSRRPLGKSPSEPAHPEATTPGKRVDSKIRVPVRYCMLGSRDLARNPHTLVEVTSFAAINKFQPFNVAVSSNVLFLLDFHSHLTRSEVVGYLGGRWDVNSQMLTVLRAFPCRSRLGDAETAAAIEEEIYQSLFLRGLSLVGWYHSHPHSPALPSLQDIDAQMDYQLRLQGSSNGFQPCLALLCSPYYSGNPGPESKISPFWVMPPPEMLLVEFYKGSPDLVRLQEPWSQEHTYLDKLKISLASRTPKDQSLCHVLEQVCGVLKQGS

SEQ ID NO: 98 - protein, 208 aa, Homo sapiens
MGEVEISALAYVKMCLHAARYPHAAVNGLFLAPAPRSGECLCLTDCVPLFHSHLALSVMLEVALNQVDVWGAQAGLVVAGYYHANAAVNDQSPGPLALKIAGRIAEFFPDAVLIMLDNQKLVPQPRVPPVIVLENQGLRWVPKDKNLVMWRDWEESRQMVGALLEDRAHQHLVDFDCHLDDIRQDWTNQRLNTQITQWVGPTNGNGNA

SEQ ID NO: 99 - protein, 310 aa, Homo sapiens
MDRLLRLGGGMPGLGQGPPTDAPAVDTAEQVYISSLALLKMLKHGRAGVPMEVMGLMLGEFVDDYTVRVIDVFAMPQSGTGVSVEAVDPVFQAKMLDMLKQTGRPEMVVGWYHSHPGFGCWLSGVDINTQQSFEALSERAVAVVVDPIQSVKGKVVIDAFRLINANMMVLGHEPRQTTSNLGHLNKPSIQALIHGLNRHYYSITINYRKNELEQKMLLNLHKKSWMEGLTLQDYSEHCKHNESVVKEMLELAKNYNKAVEEEDKMTPEQLAIKNVGKQDPKRHLEEHVDVLMTSNIVQCLAAMLDTVVFK

SEQ ID NO: 100 - protein, 828 aa, Homo sapiens
MAAEEADVDIEGDVVAAAGAQPGSGENTASVLQKDHYLDSSWRTENGLIPWTLDNTISEENRAVIEKMLLEEEYYLSKKSQPEKVWLDQKEDDKKYMKSLQKTAKIMVHSPTKPASYSVKWTIEEKELFEQGLAKFGRRWTKISKLIGSRTVLQVKSYARQYFKNKVKCGLDKETPNQKTGHNLQVKNEDKGTKAWTPSCLRGRADPNLNAVKIEKLSDDEEVDITDEVDELSSQTPQKNSSSDLLLDFPNSKMHETNQGEFITSDSQEALFSKSSRGCLQNEKQDETLSSSEITLWTEKQSNGDKKSIELNDQKFNELIKNCNKHDGRGIIVDARQLPSPEPCEIQKNLNDNEMLFHSCQMVEESHEEEELKPPEQEIEIDRNIIQEEEKQAIPEFFEGRQAKTPERYLKIRNYILDQWEICKPKYLNKTSVRPGLKNCGDVNCIGRIHTYLELIGAINFGCEQAVYNRPQTVDKVRIRDRKDAVEAYQLAQRLQSMRTRRRRVRDPWGNWCDAKDLEGQTFEHLSAEELAKRREEEKGRPVKSLKVPRPTKSSFDPFQLIPCNFFSEEKQEPFQVKVASEALLIMDLHAHVSMAEVIGLLGGRYSEVDKVVEVCAAEPCNSLSTGLQCEMDPVSQTQASETLAVRGFSVIGWYHSHPAFDPNPSLRDIDTQAKYQSYFSRGGAKFIGMIVSPYNRNNPLPYSQITCLVISEEISPDGSYRLPYKFEVQQMLEEPQWGLVFEKTRWIIEKYRLSHSSVPMDKIFRRDSDLTCLQKLLECMRKTLSKVTNCFMAEEFLTEIENLFLSNYKSNQENGVTEENCTKELLM

SEQ ID NO: 101 - protein, 415 aa, Homo sapiens
MAASISGYTFSAVCFHSANSNADHEGFLLGEVRQEETFSISDSQISNTEFLQVIEIHNHQPCSKLFSFYDYASKVNEESLDRILKDRRKKVIGWYRFRRNTQQQMSYREQVLHKQLTRILGVPDLVFLLFSFISTANNSTHALEYVLFRPNRRYNQRISLAIPNLGNTSQQEYKVSSVPNTSQSYAKVIKEHGTDFFDKDGVMKDIRAIYQVYNALQEKVQAVCADVEKSERVVESCQAEVNKLRRQITQRKNEKEQERRLQQAVLSRQMPSESLDPAFSPRMPSSGFAAEGRSTLGDAEASDPPPPYSDFHPNNQESTLSHSRMERSVFMPRPQAVGSSNYASTSAGLKYPGSGADLPPPQRAAGDSGEDSDDSDYENLIDPTEPSNSEYSHSKDSRPMAHPDEDPRNTQTSQI

SEQ ID NO: 102 - protein, 2335 aa, Homo sapiens
MAGVFPYRGPGNPVPGPLAPLPDYMSEEKLQEKARKWQQLQAKRYAEKRKFGFVDAQKEDMPPEHVRKIIRDHGDMTNRKFRHDKRVYLGALKYMPHAVLKLLENMPMPWEQIRDVPVLYHITGAISFVNEIPWVIEPVYISQWGSMWIMMRREKRDRRHFKRMRFPPFDDEEPPLDYADNILDVEPLEAIQLELDPEEDAPVLDWFYDHQPLRDSRKYVNGSTYQRWQFTLPMMSTLYRLANQLLTDLVDDNYFYLFDLKAFFTSKALNMAIPGGPKFEPLVRDINLQDEDWNEFNDINKIIIRQPIRTEYKIAFPYLYNNLPHHVHLTWYHTPNVVFIKTEDPDLPAFYFDPLINPISHRHSVKSQEPLPDDDEEFELPEFVEPFLKDTPLYTDNTANGIALLWAPRPFNLRSGRTRRALDIPLVKNWYREHCPAGQPVKVRVSYQKLLKYYVLNALKHRPPKAQKKRYLFRSFKATKFFQSTKLDWVEVGLQVCRQGYNMLNLLIHRKNLNYLHLDYNFNLKPVKTLTTKERKKSRFGNAFHLCREVLRLTKLVVDSHVQYRLGNVDAFQLADGLQYIFAHVGQLTGMYRYKYKLMRQIRMCKDLKHLIYYRFNTGPVGKGPGCGFWAAGWRVWLFFMRGITPLLERWLGNLLARQFEGRHSKGVAKTVTKQRVESHFDLELRAAVMHDILDMMPEGIKQNKARTILQHLSEAWRCWKANIPWKVPGLPTPIENMILRYVKAKADWWTNTAHYNRERIRRGATVDKTVCKKNLGRLTRLYLKAEQERQHNYLKDGPYITAEEAVAVYTTTVHWLESRRFSPIPFPPLSYKHDTKLLILALERLKEAYSVKSRLNQSQREELGLIEQAYDNPHEALSRIKRHLLTQRAFKEVGIEFMDLYSHLVPVYDVEPLEKITDAYLDQYLWYEADKRRLFPPWIKPADTEPPPLLVYKWCQGINNLQDVWETSEGECNVMLESRFEKMYEKIDLTLLNRLLRLIVDHNIADYMTAKNNVVINYKDMNHTNSYGIIRGLQFASFIVQYYGLVMDLLVLGLHRASEMAGPPQMPNDFLSFQDIATEAAHPIRLFCRYIDRIHIFFRFTADEARDLIQRYLTEHPDPNNENIVGYNNKKCWPRDARMRLMKHDVNLGRAVFWDIKNRLPRSVTTVQWENSFVSVYSKDNPNLLFNMCGFECRILPKCRTSYEEFTHKDGVWNLQNEVTKERTAQCFLRVDDESMQRFHNRVRQILMASGSTTFTKIVNKWNTALIGLMTYFREAVVNTQELLDLLVKCENKIQTRIKIGLNSKMPSRFPPVVFYTPKELGGLGMLSMGHVLIPQSDLRWSKQTDVGITHFRSGMSHEEDQLIPNLYRYIQPWESEFIDSQRVWAEYALKRQEAIAQNRRLTLEDLEDSWDRGIPRINTLFQKDRHTLAYDKGWRVRTDFKQYQVLKQNPFWWTHQRHDGKLWNLNNYRTDMIQALGGVEGILEHTLFKGTYFPTWEGLFWEKASGFEESMKWKKLTNAQRSGLNQIPNRRFTLWWSPTINRANVYVGFQVQLDLTGIFMHGKIPTLKISLIQIFRAHLWQKIHESIVMDLCQVFDQELDALEIETVQKETIHPRKSYKMNSSCADILLFASYKWNVSRPSLLADSKDVMDSTTTQKYWIDIQLRWGDYDSHDIERYARAKFLDYTTDNMSIYPSPTGVLIAIDLAYNLHSAYGNWFPGSKPLIQQAMAKIMKANPALYVLRERIRKGLQLYSSEPTEPYLSSQNYGELFSNQIIWFVDDTNVYRVTIHKTFEGNLTTKPINGAIFIFNPRTGQLFLKIIHTSVWAGQKRLGQLAKWKTAEEVAALIRSLPVEEQPKQIIVTRKGMLDPLEVHLLDFPNIVIKGSELQLPFQACLKVEKFGDLILKATEPQMVLFNLYDDWLKTISSYTAFSRLILILRALHVNNDRAKVILKPDKTTITEPHHIWPTLTDEEWIKVEVQLKDLILADYGKKNNVNVASLTQSEIRDIILGMEISAPSQQRQQIAEIEKQTKEQSQLTATQTRTVNKHGDEIITSTTSNYETQTFSSKTEWRVRAISAANLHLRTNHIYVSSDDIKETGYTYILPKNVLKKFICISDLRAQIAGYLYGVSPPDNPQVKEIRCIVMVPQWGTHQTVHLPGQLPQHEYLKEMEPLGWIHTQPNESPQLSPQDVTTHAKIMADNPSWDGEKTIIITCSFTPGSCTLTAYKLTPSGYEWGRQNTDKGNNPKGYLPSHYERVQMLLSDRFLGFFMVPAQSSWNYNFMGVRHDPNMKYELQLANPKEFYHEVHRPSHFLNFALLQEGEVYSADREDLYA

SEQ ID NO: 103 - protein, 608 aa, Homo sapiens
MAESIIIRVQSPDGVKRITATKRETAATFLKKVAKEFGFQNNGFSVYINRNKTGEITASSNKSLNLLKIKHGDLLFLFPSSLAGPSSEMETSVPPGFKVFGAPNVVEDEIDQYLSKQDGKIYRSRDPQLCRHGPLGKCVHCVPLEPFDEDYLNHLEPPVKHMSFHAYIRKLTGGADKGKFVALENISCKIKSGCEGHLPWPNGICTKCQPSAITLNRQKYRHVDNIMFENHTVADRFLDFWRKTGNQHFGYLYGRYTEHKDIPLGIRAEVAAIYEPPQIGTQNSLELLEDPKAEVVDEIAAKLGLRKVGWIFTDLVSEDTRKGTVRYSRNKDTYFLSSEECITAGDFQNKHPNMCRLSPDGHFGSKFVTAVATGGPDNQVHFEGYQVSNQCMALVRDECLLPCKDAPELGYAKESSSEQYVPDVFYKDVDKFGNEITQLARPLPVEYLIIDITTTFPKDPVYTFSISQNPFPIENRDVLGETQDFHSLATYLSQNTSSVFLDTISDFHLLLFLVTNEVMPLQDSISLLLEAVRTRNEELAQTWKRSEQWATIEQLCSTVGGQLPGLHEYGAVGGSTHTATAAMWACQHCTFMNQPGTGHCEMCSLPRT

SEQ ID NO: 104 - protein, 210 aa, Homo sapiens
MPGVKLTTQAYCKMVLHGAKYPHCAVNGLLVAEKQKPRKEHLPLGGPGAHHTLFVDCIPLFHGTLALAPMLEVALTLIDSWCKDHSYVIAGYYQANERVKDASPNQVAEKVASRIAEGFSDTALIMVDNTKFTMDCVAPTIHVYEHHENRWRCRDPHHDYCEDWPEAQRISASLLDSRSYETLVDFDNHLDDIRNDWTNPEINKAVLHLC

SEQ ID NO: 105 - protein, 409 aa, Homo sapiens
MEGESTSAVLSGFVLGALAFQHLNTDSDTEGFLLGEVKGEAKNSITDSQMDDVEVVYTIDIQKYIPCYQLFSFYNSSGEVNEQALKKILSNVKKNVVGWYKFRRHSDQIMTFRERLLHKNLQEHFSNQDLVFLLLTPSIITESCSTHRLEHSLYKPQKGLFHRVPLVVANLGMSEQLGYKTVSGSCMSTGFSRAVQTHSSKFFEEDGSLKEVHKINEMYASLQEELKSICKKVEDSEQAVDKLVKDVNRLKREIEKRRGAQIQAAREKNIQKDPQENIFLCQALRTFFPNSEFLHSCVMSLKNRHVSKSSCNYNHHLDVVDNLTLMVEHTDIPEASPASTPQIIKHKALDLDDRWQFKRSRLLDTQDKRSKADTGSSNQDKASKMSSPETDEEIEKMKGFGEYSRSPTF

SEQ ID NO: 106 - protein, 436 aa, Homo sapiens
MDQPFTVNSLKKLAAMPDHTDVSLSPEERVRALSKLGCNITISEDITPRRYFRSGVEMERMASVYLEEGNLENAFVLYNKFITLFVEKLPNHRDYQQCAVPEKQDIMKKLKEIAFPRTDELKNDLLKKYNVEYQEYLQSKNKYKAEILKKLEHQRLIEAERKRIAQMRQQQLESEQFLFFEDQLKKQELARGQMRSQQTSGLSEQIDGSALSCFSTHQNNSLLNVFADQPNKSDATNYASHSPPVNRALTPAATLSAVQNLVVEGLRCVVLPEDLCHKFLQLAESNTVRGIETCGILCGKLTHNEFTITHVIVPKQSAGPDYCDMENVEELFNVQDQHDLLTLGWIHTHPTQTAFLSSVDLHTHCSYQLMLPEAIAIVCSPKHKDTGIFRLTNAGMLEVSACKKKGFHPHTKEPRLFSICKHVLVKDIKIIVLDLR

SEQ ID NO: 107 - protein, 327 aa, Homo sapiens
MAAAAAAAAATNGTGGSSGMEVDAAVVPSVMACGVTGSVSVALHPLVILNISDHWIRMRSQEGRPVQVIGALIGKQEGRNIEVMNSFELLSHTVEEKIIIDKEYYYTKEEQFKQVFKELEFLGWYTTGGPPDPSDIHVHKQVCEIIESPLFLKLNPMTKHTDLPVSVFESVIDIINGEATMLFAELTYTLATEEAERIGVDHVARMTATGSGENSTVAEHLIAQHSAIKMLHSRVKLILEYVKASEAGEVPFNHEILREAYALCHCLPVLSTDKFKTDFYDQCNDVGLMAYLGTITKTCNTMNQFVNKFNVLYDRQGIGRRMRGLFF

SEQ ID NO: 108 - protein, 357 aa, Homo sapiens
MATPAVPVSAPPATPTPVPAAAPASVPAPTPAPAAAPVPAAAPASSSDPAAAAAATAAPGQTPASAQAPAQTPAPALPGPALPGPFPGGRVVRLHPVILASIVDSYERRNEGAARVIGTLLGTVDKHSVEVTNCFSVPHNESEDEVAVDMEFAKNMYELHKKVSPNELILGWYATGHDITEHSVLIHEYYSREAPNPIHLTVDTSLQNGRMSIKAYVSTLMGVPGRTMGVMFTPLTVKYAYYDTERIGVDLIMKTCFSPNRVIGLSSDLQQVGGASARIQDALSTVLQYAEDVLSGKVSADNTVGRFLMSLVNQVPKIVPDDFETMLNSNINDLLMVTYLANLTQSQIALNEKLVNL

SEQ ID NO: 109 - protein, 324 aa, Homo sapiens
MPELAVQKVVVHPLVLLSVVDHFNRIGKVGNQKRVVGVLLGSWQKKVLDVSNSFAVPFDEDDKDDSVWFLDHDYLENMYGMFKKVNARERIVGWYHTGPKLHKNDIAINELMKRYCPNSVLVIIDVKPKDLGLPTEAYISVEEVHDDGTPTSKTFEHVTSEIGAEEAEEVGVEHLLRDIKDTTVGTLSQRITNQVHGLKGLNSKLLDIRSYLEKVATGKLPINHQIIYQLQDVFNLLPDVSLQEFVKAFYLKTNDQMVVVYLASLIRSVVALHNLINNKIANRDAEKKEGQEKEESKKDRKEDKEKDKDKEKSDVKKEEKKEKK

SEQ ID NO: 110 - protein, 352 aa, Homo sapiens
MASRKEGTGSTATSSSSTAGAAGKGKGKGGSGDSAVKQVQIDGLVVLKIIKHYQEEGQGTEVVQGVLLGLVVEDRLEITNCFPFPQHTEDDADFDEVQYQMEMMRSLRHVNIDHLHVGWYQSTYYGSFVTRALLDSQFSYQHAIEESVVLIYDPIKTAQGSLSLKAYRLTPKLMEVCKEKDFSPEALKKANITFEYMFEEVPIVIKNSHLINVLMWELEKKSAVADKHELLSLASSNHLGKNLQLLMDRVDEMSQDIVKYNTYMRNTSKQQQQKHQYQQRRQQENMQRQSRGEPPLPEEDLSKLFKPPQPPARMDSLLIAGQINTYCQNIKEFTAQNLGKLFMAQALQEYNN

SEQ ID NO: 111 - protein, 334 aa, Homo sapiens
MAASGSGMAQKTWELANNMQEAQSIDEIYKYDKKQQQEILAAKPWTKDHHYFKYCKISALALLKMVMHARSGGNLEVMGLMLGKVDGETMIIMDSFALPVEGTETRVNAQAAAYEYMAAYIENAKQVGRLENAIGWYHSHPGYGCWLSGIDVSTQMLNQQFQEPFVAVVIDPTRTISAGKVNLGAFRTYPKGYKPPDEGPSEYQTIPLNKIEDFGVHCKQYYALEVSYFKSSLDRKLLELLWNKYWVNTLSSSSLLTNADYTTGQVFDLSEKLEQSEAQLGRGSFMLGLETHDRKSEDKLAKATRDSCKTTIEAIHGLMSQVIKDKLFNQINIS

SEQ ID NO: 112 - protein, 316 aa, Homo sapiens
MAVQVVQAVQAVHLESDAFLVCLNHALSTEKEEVMGLCIGELNDDTRSDSKFAYTGTEMRTVAEKVDAVRIVHIHSVIILRRSDKRKDRVEISPEQLSAASTEAERLAELTGRPMRVVGWYHSHPHITVWPSHVDVRTQAMYQMMDQGFVGLIFSCFIEDKNTKTGRVLYTCFQSIQAQKSSESLHGPRDFWSSSQHISIEGQKEEERYERIEIPIHIVPHVTIGKVCLESAVELPKILCQEEQDAYRRIHSLTHLDSVTKIHNGSVFTKNLCSQMSAVSGPLLQWLEDRLEQNQQHLQELQQEKEELMQELSSLE

SEQ ID NO: 113 - protein, 368 aa, Homo sapiens
SSFTIGLRGLINLGNTCFMNCIVQALTHTPILRDFFLSDRHRCEMPSPELCLVCEMSSLFRELYSGNPSPHVPYKLLHLVWIHARHLAGYRQQDAHEFLIAALDVLHRHCKGDDVGKAANNPNHCNCIIDQIFTGGLQSDVTCQACHGVSTTIDPCWDISLDLPGSCTSFWPMSPGRESSVNGESHIPGITTLTDCLRRFTRPEHLGSSAKIKCGSCQSYQESTKQLTMNKLPVVACFHFKRFEHSAKQRRKITTYISFPLELDMTPFMASSKESRMNGQLQLPTNSGNNENKYSLFAVVNHQGTLESGHYTSFIRHHKDQWFKCDDAVITKASIKDVLDSEGYLLFYHKQVLEHESEKVKEMNTQAY

SEQ ID NO: 114 - protein, 353 aa, Homo sapiens
NSFHNIDDPNCERRKKNSFVGLTNLGATCYVNTFLQVWFLNLELRQALYLCPSTCSDYMLGDGIQEEKDYEPQTICEHLQYLFALLQNSNRRYIDPSGFVKALGLDTGQQQDAQEFSKLFMSLLEDTLSKQKNPDVRNIVQQQFCGEYAYVTVCNQCGRESKLLSKFYELELNIQGHKQLTDCISEFLKEEKLEGDNRYFCENCQSKQNATRKIRLLSLPCTLNLQLMRFVFDRQTGHKKKLNTYIGFSEILDMEPYVEHKGGSYVYELSAVLIHRGVSAYSGHYIAHVKDPQSGEWYKFNDEDIEKMEGKKLQLGIEEDLAEPSKSQTRKPKCGKGTHCSRNAYMLVYRLQT

SEQ ID NO: 115 - protein, 359 aa, Homo sapiens
TAICATGLRNLGNTCFMNAILQSLSNIEQFCCYFKELPAVELRNGKTAGRRTYHTRSQGDNNVSLVEEFRKTLCALWQGSQTAFSPESLFYVVWKIMPNFRGYQQQDAHEFMRYLLDHLHLELQGGFNGVSRSAILQENSTLSASNKCCINGASTVVTAIFGGILQNEVNCLICGTESRKFDPFLDLSLDIPSQFRSKRSKNQENGPVCSLRDCLRSFTDLEELDETELYMCHKCKKKQKSTKKFWIQKLPKVLCLHLKRFHWTAYLRNKVDTYVEFPLRGLDMKCYLLEPENSGPESCLYDLAAVVVHHGSGVGSGHYTAYATHEGRWFHFNDSTVTLTDEETVVKAKAYILFYVEHQ

SEQ ID NO: 116 - protein, 300 aa, Homo sapiens
AVGAGLQNMGNTCYVNASLQCLTYTPPLANYMLSREHSQTCHRHKGCMLCTMQAHITRALHNPGHVIQPSQALAAGFHRGKQEDAHEFLMFTVDAMKKACLPGHKQVDHHSKDTTLIHQIFGGYWRSQIKCLHCHGISDTFDPYLDIALDIQAAQSVQQALEQLVKPEELNGENAYHCGVCLQRAPASKTLTLHTSAKVLILVLKRFSDVTGNKIAKNVQYPECLDMQPYMSQTNTGPLVYVLYAVLVHAGWSCHNGHYFSYVKAQEGQWYKMDDAEVTASSITSVLSQQAYVLFYIQKS

SEQ ID NO: 117 - protein, 708 aa, Homo sapiens
LPFVGLNNLGNTCYLNSILQVLYFCPGFKSGVKHLFNIISRKKEALKDEANQKDKGNCKEDSLASYELICSLQSLIISVEQLQASFLLNPEKYTDELATQPRRLLNTLRELNPMYEGYLQHDAQEVLQCILGNIQETCQLLKKEEVKNVAELPTKVEEIPHPKEEMNGINSIEMDSMRHSEDFKEKLPKGNGKRKSDTEFGNMKKKVKLSKEHQSLEENQRQTRSKRKATSDTLESPPKIIPKYISENESPRPSQKKSRVKINWLKSATKQPSILSKFCSLGKITTNQGVKGQSKENECDPEEDLGKCESDNTTNGCGLESPGNTVTPVNVNEVKPINKGEEQIGFELVEKLFQGQLVLRTRCLECESLTERREDFQDISVPVQEDELSKVEESSEISPEPKTEMKTLRWAISQFASVERIVGEDKYFCENCHHYTEAERSLLFDKMPEVITIHLKCFAASGLEFDCYGGGLSKINTPLLTPLKLSLEEWSTKPTNDSYGLFAVVMHSGITISSGHYTASVKVTDLNSLELDKGNFVVDQMCEIGKPEPLNEEEARGVVENYNDEEVSIRVGGNTQPSKVLNKKNVEAIGLLGGQKSKADYELYNKASNPDKVASTAFAENRNSETSDTTGTHESDRNKESSDQTGINISGFENKISYVVQSLKEYEGKWLLFDDSEVKVTEEKDFLNSLSPSTSPTSTPYLLFYKKL

SEQ ID NO: 118 - protein, 1164 aa, Homo sapiens
FTNLSGIRNQGGTCYLNSLLQTLHFTPEFREALFSLGPEELGLFEDKDKPDAKVRIIPLQLQRLFAQLLLLDQEAASTADLTDSFGWTSNEEMRQHDVQELNRILFSALETSLVGTSGHDLIYRLYHGTIVNQIVCKECKNVSERQEDFLDLTVAVKNVSGLEDALWNMYVEEEVFDCDNLYHCGTCDRLVKAAKSAKLRKLPPFLTVSLLRFNFDFVKCERYKETSCYTFPLRINLKPFCEQSELDDLEYIYDLFSVIIHKGGCYGGHYHVYIKDVDHLGNWQFQEEKSKPDVNLKDLQSEEEIDHPLMILKAILLEENNLIPVDQLGQKLLKKIGISWNKKYRKQHGPLRKFLQLHSQIFLLSSDESTVRLLKNSSLQAESDFQRNDQQIFKMLPPESPGLNNSISCPHWFDINDSKVQPIREKDIEQQFQGKESAYMLFYRKSQLQRPPEARANPRYGVPCHLLNEMDAANIELQTKRAECDSANNTFELHLHLGPQYHFFNGALHPVVSQTESVWDLTFDKRKTLGDLRQSIFQLLEFWEGDMVLSVAKLVPAGLHIYQSLGGDELTLCETEIADGEDIFVWNGVEVGGVHIQTGIDCEPLLLNVLHLDTSSDGEKCCQVIESPHVFPANAEVGTVLTALAIPAGVIFINSAGCPGGEGWTAIPKEDMRKTFREQGLRNGSSILIQDSHDDNSLLTKEEKWVTSMNEIDWLHVKNLCQLESEEKQVKISATVNTMVFDIRIKAIKELKLMKELADNSCLRPIDRNGKLLCPVPDSYTLKEAELKMGSSLGLCLGKAPSSSQLFLFFAMGSDVQPGTEMEIVVEETISVRDCLKLMLKKSGLQGDAWHLRKMDWCYEAGEPLCEEDATLKELLICSGDTLLLIEGQLPPLGFLKVPIWWYQLQGPSGHWESHQDQTNCTSSWGRVWRATSSQGASGNEPAQVSLLYLGDIEISEDATLAELKSQAMTLPPFLEFGVPSPAHLRAWTVERKRPGRLLRTDRQPLREYKLGRRIEICLEPLQKGENLGPQDVLLRTQVRIPGERTYAPALDLVWNAAQGGTAGSLRQRVADFYRLPVEKIEIAKYFPEKFEWLPISSWNQQITKRKKKKKQDYLQGAPYYLKDGDTIGVKNLLIDDDDDFSTIRDDTGKEKQKQRALGRRKSQ

SEQ ID NO: 119 - protein, 311 aa, Homo sapiens
TGYVGLKNQGATCYMNSLLQTLFFTNQLRKAVYMMPTEGDDSSKSVPLALQRVFYELQHSDKPVGTKKLTKSFGWETLDSFMQHDVQELCRVLLDNVENKMKGTCVEGTIPKLFRGKMVSYIQCKEVDYRSDRREDYYDIQLSIKGKKNIFESFVDYVAVEQLDGDNKYDAGEHGLQEAEKGVKFLTLPPVLHLQLMRFMYDPQTDQNIKINDRFEFPEQLPLDEFLQKTDPKDPANYILHAVLVHSGDNHGGHYVVYLNPKGDGKWCKFDDDVVSRCTKEEAIEHNYGGHDDDLSVRHCTNAYMLVYIRE

SEQ ID NO: 120 - protein, 344 aa, Homo sapiens
AVGAGLQNMGNTCYVNASLQCLTYTPPLANYMLSREHSQTCHRHKGCMLCTMQAHITRALHNPGHVIQPSQALAAGFHRGKQEDAHEFLMFTVDAMKKACLPGHKQVDHHSKDTTLIHQIFGGYWRSQIKCLHCHGISDTFDPYLDIALDIQAAQSVQQALEQLAKPEELNGENAYHCGVCLQRAPASKTLTLHTSAKVLILVLKRFSDVTGNKIAKNVQYPECLDMQPYMSQPNTGPLVYVLYAVLVHAGWSCHNGHYFSYVKAQEGQWYKMDDAEVTASSITSVLSQQAYVLFYIQKSEWERHSESVSRGREPRALGAEDTDRRATQGELKRDHPCLQAPEL

SEQ ID NO: 121 - protein, 344 aa, Homo sapiens
AVGAGLQNMGNTCYVNASLQCLTYTPPLANYMLSREHSQTCHRHKGCMLCTMQAHITRALHNPGHVIQPSQALAAGFHRGKQEDAHEFLMFTVDAMKKACLPGHKQVDHHSKDTTLIHQIFGGYWRSQIKCLHCHGISDTFDPYLDIALDIQAAQSVQQALEQLVKPEELNGENAYHCGVCLQRAPASKMLTLLTSAKVLILVLKRFSDVTGNKIAKNVQYPECLDMQPYMSQPNTGPLVYVLYAVLVHAGWSCHNGHYFSYVKAQEGQWYKMDDAEVTASSITSVLSQQAYVLFYIQKSEWERHSESVSRGREPRALGAEDTDRRATQGELKRDHPCLQAPEL

SEQ ID NO: 122 - protein, 344 aa, Homo sapiens
AVGAGLQNMGNTCYVNASLQCLTYKPPLANYMLFREHSQTCHRHKGCMLCTMQAHITRALHIPGHVIQPSQALAAGFHRGKQEDAHEFLMFTVDAMRKACLPGHKQVDRHSKDTTLIHQIFGGYWRSQIKCLHCHGISDTFDPYLDIALDIQAAQSVQQALEQLVKPEELNGENAYHCGVCLQRAPASKTLTLHNSAKVLILVLKRFPDVTGNKIAKNVQYPECLDMQPYMSQQNTGPLVYVLYAVLVHAGWSCHNGHYSSYVKAQEGQWYKMDDAEVTASSITSVLSQQAYVLFYIQKSEWERHSESVSRGREPRALGVEDTDRRATQGELKRDHPCLQAPEL

SEQ ID NO: 123 - protein, 307 aa, Homo sapiens
WGLVGLHNIGQTCCLNSLIQVFVMNVDFARILKRITVPRGADEQRRSVPFQMLLLLEKMQDSRQKAVWPLELAYCLQKYNVPLFVQHDAAQLYLKLWNLIKDQIADVHLVERLQALYMIRMKDSLICLDCAMESSRNSSMLTLRLSFFDVDSKPLKTLEDALHCFFQPRELSSKSKCFCENCGKKTRGKQVLKLTHLPQTLTIHLMRFSIRNSQTRKICHSLYFPQSLDFSQILPMKRESCDAEEQSGGQYELFAVIAHVGMADSGHYCVYIRNAVDGKWFCFNDSNICLVSWEDIQCTYGNPNYHW

SEQ ID NO: 124 - protein, 511 aa, Homo sapiens
SETGKTGLINLGNTCYMNSVIQALFMATDFRRQVLSLNLNGCNSLMKKLQHLFAFLAHTQREAYAPRIFFEASRPPWFTPRSQQDCSEYLRFLLDRLHEEEKILKVQASHKPSEILECSETSLQEVASKAAVLTETPRTSDGEKTLIEKMFGGKLRTHIRCLNCRSTSQKVEAFTDLSLAFCPSSSLENMSVQDPASSPSIQDGGLMQASVPGPSEEPVVYNPTTAAFICDSLVNEKTIGSPPNEFYCSENTSVPNESNKILVNKDVPQKPGGETTPSVTDLLNYFLAPEILTGDNQYYCENCASLQNAEKTMQITEEPEYLILTLLRFSYDQKYHVRRKILDNVSLPLVLELPVKRITSFSSLSESWSVDVDFTDLSENLAKKLKPSGTDEASCTKLVPYLLSSVVVHSGISSESGHYYSYARNITSTDSSYQMYHQSEALALASSQSHLLGRDSPSAVFEQDLENKEMSKEWFLFNDSRVTFTSFQSVQKITSRFPKDTAYVLLYKKQH

SEQ ID NO: 125 - protein, 616 aa, Homo sapiens
RPPGAQGLKNHGNTCFMNAVVQCLSNTDLLAEFLALGRYRAAPGRAEVTEQLAALVRALWTREYTPQLSAEFKNAVSKYGSQFQGNSQHDALEFLLWLLDRVHEDLEGSSRGPVSEKLPPEATKTSENCLSPSAQLPLGQSFVQSHFQAQYRSSLTCPHCLKQSNTFDPFLCVSLPIPLRQTRFLSVTLVFPSKSQRFLRVGLAVPILSTVAALRKMVAEEGGVPADEVILVELYPSGFQRSFFDEEDLNTIAEGDNVYAFQVPPSPSQGTLSAHPLGLSASPRLAAREGQRFSLSLHSESKVLILFCNLVGSGQQASRFGPPFLIREDRAVSWAQLQQSILSKVRHLMKSEAPVQNLGSLFSIRVVGLSVACSYLSPKDSRPLCHWAVDRVLHLRRPGGPPHVKLAVEWDSSVKERLFGSLQEERAQDADSVWQQQQAHQQHSCTLDECFQFYTKEEQLAQDDAWKCPHCQVLQQGMVKLSLWTLPDILIIHLKRFCQVGERRNKLSTLVKFPLSGLNMAPHVAQRSTSPEAGLGPWPSWKQPDCLPTSYPLDFLYDLYAVCNHHGNLQGGHYTAYCRNSLDGQWYSYDDSTVEPLREDEVNTRGAYILFYQKRN

SEQ ID NO: 126 - protein, 339 aa, Homo sapiens
SAQGLAGLRNLGNTCFMNSILQCLSNTRELRDYCLQRLYMRDLHHGSNAHTALVEEFAKLIQTIWTSSPNDVVSPSEFKTQIQRYAPRFVGYNQQDAQEFLRFLLDGLHNEVNRVTLRPKSNPENLDHLPDDEKGRQMWRKYLEREDSRIGDLFVGQLKSSLTCTDCGYCSTVFDPFWDLSLPIAKRGYPEVTLMDCMRLFTKEDVLDGDEKPTCCRCRGRKRCIKKFSIQRFPKILVLHLKRFSESRIRTSKLTTFVNFPLRDLDLREFASENTNHAVYNLYAVSNHSGTTMGGHYTAYCRSPGTGEWHTFNDSSVTPMSSSQVRTSDAYLLFYELAS

SEQ ID NO: 127 - protein, 628 aa, Homo sapiens
LSVRGITNLGNTCFFNAVMQNLAQTYTLTDLMNEIKESSTKLKIFPSSDSQLDPLVVELSRPGPLTSALFLFLHSMKETEKGPLSPKVLFNQLCQKAPRFKDFQQQDSQELLHYLLDAVRTEETKRIQASILKAFNNPTTKTADDETRKKVKAYGKEGVKMNFIDRIFIGELTSTVMCEECANISTVKDPFIDISLPIIEERVSKPLLWGRMNKYRSLRETDHDRYSGNVTIENIHQPRAAKKHSSSKDKSQLIHDRKCIRKLSSGETVTYQKNENLEMNGDSLMFASLMNSESRLNESPTDDSEKEASHSESNVDADSEPSESESASKQTGLFRSSSGSGVQPDGPLYPLSAGKLLYTKETDSGDKEMAEAISELRLSSTVTGDQDFDRENQPLNISNNLCFLEGKHLRSYSPQNAFQTLSQSYITTSKECSIQSCLYQFTSMELLMGNNKLLCENCTKNKQKYQEETSFAEKKVEGVYTNARKQLLISAVPAVLILHLKRFHQAGLSLRKVNRHVDFPLMLDLAPFCSATCKNASVGDKVLYGLYGIVEHSGSMREGHYTAYVKVRTPSRKLSEHNTKKKNVPGLKAADNESAGQWVHVSDTYLQVVPESRALSAQAYLLFYERVL

SEQ ID NO: 128 - protein, 876 aa, Homo sapiens
TEKGATGLSNLGNTCFMNSSIQCVSNTQPLTQYFISGRHLYELNRTNPIGMKGHMAKCYGDLVQELWSGTQKNVAPLKLRWTIAKYAPRFNGFQQQDSQELLAFLLDGLHEDLNRVHEKPYVELKDSDGRPDWEVAAEAWDNHLRRNRSIVVDLFHGQLRSQVKCKTCGHISVRFDPFNFLSLPLPMDSYMHLEITVIKLDGTTPVRYGLRLNMDEKYTGLKKQLSDLCGLNSEQILLAEVHGSNIKNFPQDNQKVRLSVSGFLCAFEIPVPVSPISASSPTQTDFSSSPSTNEMFTLTTNGDLPRPIFIPNGMPNTVVPCGTEKNFTNGMVNGHMPSLPDSPFTGYIIAVHRKMMRTELYFLSSQKNRPSLFGMPLIVPCTVHTRKKDLYDAVWIQVSRLASPLPPQEASNHAQDCDDSMGYQYPFTLRVVQKDGNSCAWCPWYRFCRGCKIDCGEDRAFIGNAYIAVDWDPTALHLRYQTSQERVVDEHESVEQSRRAQAEPINLDSCLRAFTSEEELGENEMYYCSKCKTHCLATKKLDLWRLPPILIIHLKRFQFVNGRWIKSQKIVKFPRESFDPSAFLVPRDPALCQHKPLTPQGDELSEPRILAREVKKVDAQSSAGEEDVLLSKSPSSLSANIISSPKGSPSSSRKSGTSCPSSKNSSPNSSPRTLGRSKGRLRLPQIGSKNKLSSSKENLDASKENGAGQICELADALSRGHVLGGSQPELVTPQDHEVALANGFLYEHEACGNGYSNGQLGNHSEEDSTDDQREDTRIKPIYNLYAISCHSGILGGGHYVTYAKNPNCKWYCYNDSSCKELHPDEIDTDSAYILFYEQQGIDYAQFLPKTDGKKMADTSSMDEDFESDYKKYCVLQ

SEQ ID NO: 129 - protein, 300 aa, Homo sapiens
AVGAGLQNMGNTCYVNASLQCLTYTPPLANYMLSREHSQTCHRHKGCMLCTMQAHITRALHNPGHVIQPSQALAAGFHRGKQEDAHEFLMFTVDAMKKACLPGHKQVDHHSKDTTLIHQIFGGYWRSQIKCLHCHGISDTFDPYLDIALDIQAAQSVQQALEQLVKPEELNGENAYHCGVCLQRAPASKTLTLHTSAKVLILVLKRFSDVTGNKIAKNVQYPECLDMQPYMSQQNTGPLVYVLYAVLVHAGWSCHNGHYFSYVKAQEGQWYKMDDAEVTASSITSVLSQQAYVLFYIQKS

SEQ ID NO: 130 - protein, 313 aa, Homo sapiens
RVGAGLQNLGNTCFANAALQCLTYTPPLANYMLSHEHSKTCHAEGFCMMCTMQAHITQALSNPGDVIKPMFVINEMRRIARHFRFGNQEDAHEFLQYTVDAMQKACLNGSNKLDRHTQATTLVCQIFGGYLRSRVKCLNCKGVSDTFDPYLDITLEIKAAQSVNKALEQFVKPEQLDGENSYKCSKCKKMVPASKRFTIHRSSNVLTLSLKRFANFTGGKIAKDVKYPEYLDIRPYMSQPNGEPIVYVLYAVLVHTGFNCHAGHYFCYIKASNGLWYQMNDSIVSTSDIRSVLSQQAYVLFYIRSHDVKNGGE

SEQ ID NO: 131 - protein, 344 aa, Homo sapiens
AVGAGLQKIGNTFYVNVSLQCLTYTLPLSNYMLSREDSQTCHLHKCCMFCTMQAHITWALHSPGHVIQPSQVLAAGFHRGEQEDAHEFLMFTVDAMKKACLPGHKQLDHHSKDTTLIHQIFGAYWRSQIKYLHCHGVSDTFDPYLDIALDIQAAQSVKQALEQLVKPKELNGENAYHCGLCLQKAPASKTLTLPTSAKVLILVLKRFSDVTGNKLAKNVQYPKCRDMQPYMSQQNTGPLVYVLYAVLVHAGWSCHNGHYFSYVKAQEGQWYKMDDAEVTASGITSVLSQQAYVLFYIQKSEWERHSESVSRGREPRALGAEDTDRPATQGELKRDHPCLQVPEL

SEQ ID NO: 132 - protein, 344 aa, Homo sapiens
AVGAGLQNMGNTCYVNASLQCLTYTPPLANYMLSREHSQTCHRHKGCMLCTMQAHITRALHNPGHVIQPSQALAAGFHRGKQEDAHEFLMFTVDAMKKACLPGHKQVDHHSKDTTLIHQIFGGYWRSQIKCLHCHGISDTFDPYLDIALDIQAAQSVQQALEQLVKPEELNGENAYHCGVCLQRAPASKTLTLHTSAKVLILVLKRFSDVTGNKIAKNVQYPECLDMQPYMSQQNTGPLVYVLYAVLVHAGWSCHNGHYFSYVKAQEGQWYKMDDAEVTAASITSVLSQQAYVLFYIQKSEWERHSESVSRGREPRALGAEDTDRRATQGELKRDHPCLQAPEL

SEQ ID NO: 133 - protein, 533 aa, Homo sapiens
YGPGYTGLKNLGNSCYLSSVMQAIFSIPEFQRAYVGNLPRIFDYSPLDPTQDFNTQMTKLGHGLLSGQYSKPPVKSELIEQVMKEEHKPQQNGISPRMFKAFVSKSHPEFSSNRQQDAQEFFLHLVNLVERNRIGSENPSDVFRFLVEERIQCCQTRKVRYTERVDYLMQLPVAMEAATNKDELIAYELTRREAEANRRPLPELVRAKIPFSACLQAFSEPENVDDFWSSALQAKSAGVKTSRFASFPEYLVVQIKKFTFGLDWVPKKFDVSIDMPDLLDINHLRARGLQPGEEELPDISPPIVIPDDSKDRLMNQLIDPSDIDESSVMQLAEMGFPLEACRKAVYFTGNMGAEVAFNWIIVHMEEPDFAEPLTMPGYGGAASAGASVFGASGLDNQPPEEIVAIITSMGFQRNQAIQALRATNNNLERALDWIFSHPEFEEDSDFVIEMENNANANIISEAKPEGPRVKDGSGTYELFAFISHMGTSTMSGHYICHIKKEGRWVIYNDHKVCASERPPKDLGYMYFYRRIPS

SEQ ID NO: 134 - protein, 629 aa, Homo sapiens
KGQPGICGLTNLGNTCFMNSALQCLSNVPQLTEYFLNNCYLEELNFRNPLGMKGEIAEAYADLVKQAWSGHHRSIVPHVFKNKVGHFASQFLGYQQHDSQELLSFLLDGLHEDLNRVKKKEYVELCDAAGRPDQEVAQEAWQNHKRRNDSVIVDTFHGLFKSTLVCPDCGNVSVTFDPFCYLSVPLPISHKRVLEVFFIPMDPRRKPEQHRLVVPKKGKISDLCVALSKHTGISPERMMVADVFSHRFYKLYQLEEPLSSILDRDDIFVYEVSGRIEAIEGSREDIVVPVYLRERTPARDYNNSYYGLMLFGHPLLVSVPRDRFTWEGLYNVLMYRLSRYVTKPNSDDEDDGDEKEDDEEDKDDVPGPSTGGSLRDPEPEQAGPSSGVTNRCPFLLDNCLGTSQWPPRRRRKQLFTLQTVNSNGTSDRTTSPEEVHAQPYIAIDWEPEMKKRYYDEVEAEGYVKHDCVGYVMKKAPVRLQECIELFTTVETLEKENPWYCPSCKQHQLATKKLDLWMLPEILIIHLKRFSYTKFSREKLDTLVEFPIRDLDFSEFVIQPQNESNPELYKYDLIAVSNHYGGMRDGHYTTFACNKDSGQWHYFDDNSVSPVNENQIESKAAYVLFYQRQD

SEQ ID NO: 135 - protein, 300 aa, Homo sapiens
AVGAGLQNMGNTCYENASLQCLTYTLPLANYMLSREHSQTCQRPKCCMLCTMQAHITWALHSPGHVIQPSQALAAGFHRGKQEDVHEFLMFTVDAMKKACLPGHKQVDHHCKDTTLIHQIFGGCWRSQIKCLHCHGISDTFDPYLDIALDIQAAQSVKQALEQLVKPEELNGENAYHCGLCLQRAPASNTLTLHTSAKVLILVLKRFSDVAGNKLAKNVQYPECLDMQPYMSQQNTGPLVYVLYAVLVHAGWSCHDGHYFSYVKAQEVQWYKMDDAEVTVCSIISVLSQQAYVLFYIQKS

SEQ ID NO: 136 - protein, 387 aa, Homo sapiens
ASAMELPCGLTNLGNTCYMNATVQCIRSVPELKDALKRYAGALRASGEMASAQYITAALRDLFDSMDKTSSSIPPIILLQFLHMAFPQFAEKGEQGQYLQQDANECWIQMMRVLQQKLEAIEDDSVKETDSSSASAATPSKKKSLIDQFFGVEFETTMKCTESEEEEVTKGKENQLQLSCFINQEVKYLFTGLKLRLQEEITKQSPTLQRNALYIKSSKISRLPAYLTIQMVRFFYKEKESVNAKVLKDVKFPLMLDMYELCTPELQEKMVSFRSKFKDLEDKKVNQQPNTSDKKSSPQKEVKYEPFSFADDIGSNNCGYYDLQAVLTHQGRSSSSGHYVSWVKRKQDEWIKFDDDKVSIVTPEDILRLSGGGDWHIAYVLLYGPRR

SEQ ID NO: 137 - protein, 630 aa, Homo sapiens
SHIQPGLCGLGNLGNTCFMNSALQCLSNTAPLTDYFLKDEYEAEINRDNPLGMKGEIAEAYAELIKQMWSGRDAHVAPRMFKTQVGRFAPQFSGYQQQDSQELLAFLLDGLHEDLNRVKKKPYLELKDANGRPDAVVAKEAWENHRLRNDSVIVDTFHGLFKSTLVCPECAKVSVTFDPFCYLTLPLPLKKDRVMEVFLVPADPHCRPTQYRVTVPLMGAVSDLCEALSRLSGIAAENMVVADVYNHRFHKIFQMDEGLNHIMPRDDIFVYEVCSTSVDGSECVTLPVYFRERKSRPSSTSSASALYGQPLLLSVPKHKLTLESLYQAVCDRISRYVKQPLPDEFGSSPLEPGACNGSRNSCEGEDEEEMEHQEEGKEQLSETEGSGEDEPGNDPSETTQKKIKGQPCPKRLFTFSLVNSYGTADINSLAADGKLLKLNSRSTLAMDWDSETRRLYYDEQESEAYEKHVSMLQPQKKKKTTVALRDCIELFTTMETLGEHDPWYCPNCKKHQQATKKFDLWSLPKILVVHLKRFSYNRYWRDKLDTVVEFPIRGLNMSEFVCNLSARPYVYDLIAVSNHYGAMGVGHYTAYAKNKLNGKWYYFDDSNVSLASEDQIVTKAAYVLFYQRRD

SEQ ID NO: 138 - protein, 595 aa, Homo sapiens
KICHGLPNLGNTCYMNAVLQSLLSIPSFADDLLNQSFPWGKIPLNALTMCLARLLFFKDTYNIEIKEMLLLNLKKAISAAAEIFHGNAQNDAHEFLAHCLDQLKDNMEKLNTIWKPKSEFGEDNFPKQVFADDPDTSGFSCPVITNFELELLHSIACKACGQVILKTELNNYLSINLPQRIKAHPSSIQSTFDLFFGAEELEYKCAKCEHKTSVGVHSFSRLPRILIVHLKRYSLNEFCALKKNDQEVIISKYLKVSSHCNEGTRPPLPLSEDGEITDFQLLKVIRKMTSGNISVSWPATKESKDILAPHIGSDKESEQKKGQTVFKGASRRQQQKYLGKNSKPNELESVYSGDRAFIEKEPLAHLMTYLEDTSLCQFHKAGGKPASSPGTPLSKVDFQTVPENPKRKKYVKTSKFVAFDRIINPTKDLYEDKNIRIPERFQKVSEQTQQCDGMRICEQAPQQALPQSFPKPGTQGHTKNLLRPTKLNLQKSNRNSLLALGSNKNPRNKDILDKIKSKAKETKRNDDKGDHTYRLISVVSHLGKTLKSGHYICDAYDFEKQIWFTYDDMRVLGIQEAQMQEDRRCTGYIFFYMHN

SEQ ID NO: 139 - protein, 723 aa, Homo sapiens
LPGFTGLVNLGNTCFMNSVIQSLSNTRELRDFFHDRSFEAEINYNNPLGTGGRLAIGFAVLLRALWKGTHHAFQPSKLKAIVASKASQFTGYAQHDAQEFMAFLLDGLHEDLNRIQNKPYTETVDSDGRPDEVVAEEAWQRHKMRNDSFIVDLFQGQYKSKLVCPVCAKVSITFDPFLYLPVPLPQKQKVLPVFYFAREPHSKPIKFLVSVSKENSTASEVLDSLSQSVHVKPENLRLAEVIKNRFHRVFLPSHSLDTVSPSDTLLCFELLSSELAKERVVVLEVQQRPQVPSVPISKCAACQRKQQSEDEKLKRCTRCYRVGYCNQLCQKTHWPDHKGLCRPENIGYPFLVSVPASRLTYARLAQLLEGYARYSVSVFQPPFQPGRMALESQSPGCTTLLSTGSLEAGDSERDPIQPPELQLVTPMAEGDTGLPRVWAAPDRGPVPSTSGISSEMLASGPIEVGSLPAGERVSRPEAAVPGYQHPSEAMNAHTPQFFIYKIDSSNREQRLEDKGDTPLELGDDCSLALVWRNNERLQEFVLVASKELECAEDPGSAGEAARAGHFTLDQCLNLFTRPEVLAPEEAWYCPQCKQHREASKQLLLWRLPNVLIVQLKRFSFRSFIWRDKINDLVEFPVRNLDLSKFCIGQKEEQLPSYDLYAVINHYGGMIGGHYTACARLPNDRSSQRSDVGWRLFDDSTVTTVDESQVVTRYAYVLFYRRRN

SEQ ID NO: 140 - protein, 386 aa, Homo sapiens
SLQPRGLINKGNWCYINATLQALVACPPMYHLMKFIPLYSKVQRPCTSTPMIDSFVRLMNEFTNMPVPPKPRQALGDKIVRDIRPGAAFEPTYIYRLLTVNKSSLSEKGRQEDAEEYLGFILNGLHEEMLNLKKLLSPSNEKLTISNGPKNHSVNEEEQEEQGEGSEDEWEQVGPRNKTSVTRQADFVQTPITGIFGGHIRSVVYQQSSKESATLQPFFTLQLDIQSDKIRTVQDALESLVARESVQGYTTKTKQEVEISRRVTLEKLPPVLVLHLKRFVYEKTGGCQKLIKNIEYPVDLEISKELLSPGVKNKNFKCHRTYRLFAVVYHHGNSATGGHYTTDVFQIGLNGWLRIDDQTVKVINQYQVVKPTAERTAYLLYYRRVD

SEQ ID NO: 141 - protein, 658 aa, Homo sapiens
MDRCKHVGRLRLAQDHSILNPQKWCCLECATTESVWACLKCSHVACGRYIEDHALKHFEETGHPLAMEVRDLYVFCYLCKDYVLNDNPEGDLKLLRSSLLAVRGQKQDTPVRRGRTLRSMASGEDVVLPQRAPQGQPQMLTALWYRRQRLLARTLRLWFEKSSRGQAKLEQRRQEEALERKKEEARRRRREVKRRLLEELASTPPRKSARLLLHTPRDAGPAASRPAALPTSRRVPAATLKLRRQPAMAPGVTGLRNLGNTCYMNSILQVLSHLQKFRECFLNLDPSKTEHLFPKATNGKTQLSGKPTNSSATELSLRNDRAEACEREGFCWNGRASISRSLELIQNKEPSSKHISLCRELHTLFRVMWSGKWALVSPFAMLHSVWSLIPAFRGYDQQDAQEFLCELLHKVQQELESEGTTRRILIPFSQRKLTKQVLKVVNTIFHGQLLSQVTCISCNYKSNTIEPFWDLSLEFPERYHCIEKGFVPLNQTECLLTEMLAKFTETEALEGRIYACDQCNSKRRKSNPKPLVLSEARKQLMIYRLPQVLRLHLKRFRWSGRNHREKIGVHVVFDQVLTMEPYCCRDMLSSLDKETFAYDLSAVVMHHGKGFGSGHYTAYCYNTEGGFWVHCNDSKLNVCSVEEVCKTQAYILFYTQRT

SEQ ID NO: 142 - protein, 300 aa, Homo sapiens
AVGAGLQNMGNTCYLNASLQCLTYTPPLANYMLSREHSQTCQRPKCCMLCTMQAHITWALHSPGHVIQPSQALAAGFHRGKQEDAHEFLMFTVDAMKKACLPGHKQVDHHSKDTTLIHQIFGGCWRSQIKCLHCHGISDTFDPYLDIALDIQAAQSVKQALEQLVKPEELNGENAYPCGLCLQRAPASNTLTLHTSAKVLILVLKRFCDVTGNKLAKNVQYPECLDMQPYMSQQNTGPLVYVLYAVLVHAGWSCHNGYYFSYVKAQEGQWYKMDDAEVTACSITSVLSQQAYVLFYIQKS

SEQ ID NO: 143 - protein, 311 aa, Homo sapiens; identical to SEQ ID NO: 119

SEQ ID NO: 144 - protein, 338 aa, Homo sapiens
AQGLAGLRNLGNTCFMNSILQCLSNTRELRDYCLQRLYMRDLHHGSNAHTALVEEFAKLIQTIWTSSPNDVVSPSEFKTQIQRYAPRFVGYNQQDAQEFLRFLLDGLHNEVNRVTLRPKSNPENLDHLPDDEKGRQMWRKYLEREDSRIGDLFVGQLKSSLTCTDCGYCSTVFDPFWDLSLPIAKRGYPEVTLMDCMRLFTKEDVLDGDEKPTCCRCRGRKRCIKKFSIQRFPKILVLHLKRFSESRIRTSKLTTFVNFPLRDLDLREFASENTNHAVYNLYAVSNHSGTTMGGHYTAYCRSPGTGEWHTFNDSSVTPMSSSQVRTSDAYLLFYELAS

SEQ ID NO: 145 - protein, 363 aa, Homo sapiens
MIGKKKGIQGHYNSCYLDSTLFCLFAFSSVLDTVLLRPKEKNDVEYYSETQELLRTEIVNPLRIYGYVCATKIMKLRKILEKVEAASGFTSEEKDPEEFLNILFHHILRVEPLLKIRSAGQKVQDCYFYQIFMEKNEKVGVPTIQQLLEWSFINSNLKFAEAPSCLIIQMPRFGKDFKLFKKIFPSLELNITDLLEDTPRQCRICGGLAMYECRECYDDPDISAGKIKQFCKTCNTQVHLHPKRLNHKYNPVSLPKDLPDWDWRHGCIPCQNMELFAVLCIETSHYVAFVKYGKDDSAWLFFDSMADRDGGQNGFNIPQVTPCPEVGEYLKMSLEDLHSLDSRRIQGCARRLLCDAYMCMYQS

SEQ ID NO: 146 - protein, 300 aa, Homo sapiens; identical to SEQ ID NO: 116

SEQ ID NO: 147 - protein, 341 aa, Homo sapiens
LGNTCFMNCIVQALTHTPLLRDFFLSDRHRCEMQSPSSCLVCEMSSLFQEFYSGHRSPHIPYKLLHLVWTHARHLAGYEQQDAHEFLIAALDVLHRHCKGDDNGKKANNPNHCNCIIDQIFTGGLQSDVTCQVCHGVSTTIDPFWDISLDLPGSSTPFWPLSPGSEGNVVNGESHVSGTTTLTDCLRRFTRPEHLGSSAKIKCSGCHSYQESTKQLTMKKLPIVACFHLKRFEHSAKLRRKITTYVSFPLELDMTPFMASSKESRMNGQYQQPTDSLNNDNKYSLFAVVNHQGTLESGHYTSFIRQHKDQWFKCDDAIITKASIKDVLDSEGYLLFYHKQF

SEQ ID NO: 148 - protein, 440 aa, Homo sapiens
KGLVPGLVNLGNTCFMNSLLQGLSACPAFIRWLEEFTSQYSRDQKEPPSHQYLSLTLLHLLKALSCQEVTDDEVLDASCLLDVLRMYRWQISSFEEQDAHELFHVITSSLEDERDRQPRVTHLFDVHSLEQQSEITPKQITCRTRGSPHPTSNHWKSQHPFHGRLTSNMVCKHCEHQSPVRFDTFDSLSLSIPAATWGHPLTLDHCLHHFISSESVRDVVCDNCTKIEAKGTLNGEKVEHQRTTFVKQLKLGKLPQCLCIHLQRLSWSSHGTPLKRHEHVQFNEFLMMDIYKYHLLGHKPSQHNPKLNKNPGPTLELQDGPGAPTPVLNQPGAPKTQIFMNGACSPSLLPTLSAPMPFPLPVVPDYSSSTYLFRLMAVVVHHGDMHSGHFVTYRRSPPSARNPLSTSNQWLWVSDDTVRKASLQEVLSSSAYLLFYERVL

SEQ ID NO: 149 - protein, 496 aa, Homo sapiens
GWPVGLKNVGNTCWFSAVIQSLFQLPEFRRLVLSYSLPQNVLENCRSHTEKRNIMFMQELQYLFALMMGSNRKFVDPSAALDLLKGAFRSSEEQQQDVSEFTHKLLDWLEDAFQLAVNVNSPRNKSENPMVQLFYGTFLTEGVREGKPFCNNETFGQYPLQVNGYRNLDECLEGAMVEGDVELLPSDHSVKYGQERWFTKLPPVLTFELSRFEFNQSLGQPEKIHNKLEFPQIIYMDRYMYRSKELIRNKRECIRKLKEEIKILQQKLERYVKYGSGPARFPLPDMLKYVIEFASTKPASESCPPESDTHMTLPLSSVHCSVSDQTSKESTSTESSSQDVESTFSSPEDSLPKSKPLTSSRSSMEMPSQPAPRTVTDEEINFVKTCLQRWRSEIEQDIQDLKTCIASTTQTIEQMYCDPLLRQVPYRLHAVLVHEGQANAGHYWAYIYNQPRQSWLKYNDISVTESSWEEVERDSYGGLRNVSAYCLMYINDKLPY

SEQ ID NO: 150 - protein, 300 aa, Homo sapiens
AVGAGLQNMGNTCYENASLQCLTYTPPLANYMLSREHSQTCQRPKCCMLCTMQAHITWALHSPGHVIQPSQALAAGFHRGKQEDAHEFLMFTVDAMKKACLPGHKQVDHHSKDTTLIHQIFGGCWRSQIKCLHCHGISDTFDPYLDIALDIQAAQSVKQALEQLVKPEELNGENAYHCGLCLQRAPASKTLTLHTSAKVLILVLKRFSDVTGNKLAKNVQYPECLDMQPYMSQQNTGPLVYVLYAVLVHAGWSCHDGHYFSYVKAQEGQWYKMDDAKVTACSITSVLSQQAYVLFYIQKS

SEQ ID NO: 151 - protein, 644 aa, Homo sapiens
PVPGVAGLRNHGNTCFMNATLQCLSNTELFAEYLALGQYRAGRPEPSPDPEQPAGRGAQGQGEVTEQLAHLVRALWTLEYTPQHSRDFKTIVSKNALQYRGNSQHDAQEFLLWLLDRVHEDLNHSVKQSGQPPLKPPSETDMMPEGPSFPVCSTFVQELFQAQYRSSLTCPHCQKQSNTFDPFLCISLPIPLPHTRPLYVTVVYQGKCSHCMRIGVAVPLSGTVARLREAVSMETKIPTDQIVLTEMYYDGFHRSFCDTDDLETVHESDCIFAFETPEIFRPEGILSQRGIHLNNNLNHLKFGLDYHRLSSPTQTAAKQGKMDSPTSRAGSDKIVLLVCNRACTGQQGKRFGLPFVLHLEKTIAWDLLQKEILEKMKYFLRPTVCIQVCPFSLRVVSVVGITYLLPQEEQPLCHPIVERALKSCGPGGTAHVKLVVEWDKETRDFLFVNTEDEYIPDAESVRLQRERHHQPQTCTLSQCFQLYTKEERLAPDDAWRCPHCKQLQQGSITLSLWTLPDVLIIHLKRFRQEGDRRMKLQNMVKFPLTGLDMTPHVVKRSQSSWSLPSHWSPWRRPYGLGRDPEDYIYDLYAVCNHHGTMQGGHYTAYCKNSVDGLWYCFDDSDVQQLSEDEVCTQTAYILFYQRRT

SEQ ID NO: 152 - protein, 344 aa, Homo sapiens
AVGAGLQNMGNTCYVNASLQCLTYTPPLANYMLSREHSQTCHRHKGCMLCTMQAHITRALHNPGHVIQPSQALAAGFHRGKQEDAHEFLMFTVDAMKKACLPGHKQVDHHSKDTTLIHQIFGGYWRSQIKCLHCHGISDTFDPYLDIALDIQAAQSVQQALEQLVKPEELNGENAYHCGVCLQRAPASKTLTLHTSAKVLILVLKRFSDVTGNKIAKNVQYPECLDMQPYMSQTNTGPLVYVLYAVLVHAGWSCHNGHYFSYVKAQEGQWYKMDDAEVTASSITSVLSQQAYVLFYIQKSEWERHSESVSRGREPRALGAEDTDRRATQGELKRDHPCLQAPEL

SEQ ID NO: 153 - protein, 300 aa, Homo sapiens
AVGAGLQNMGNTCYVNASLQCLTYTPPLANYMLSREHSQTCHRHKGCMLCTMQAHITRALHNPGHVIQPSQALAAGFHRGKQEDAHEFLMFTVDAMKKACLPGHKQVDHHSKDTTLIHQIFGGYWRSQIKCLHCHGISDTFDPYLDIALDIQAAQSVQQALEQLVKPEELNGENAYHCGVCLQRAPASKTLTLHTSAKVLILVLKRFSDVTGNKIDKNVQYPECLDMKLYMSQTNSGPLVYVLYAVLVHAGWSCHNGHYFSYVKAQEGQWYKMDDAEVTASSITSVLSQQAYVLFYIQKS

SEQ ID NO: 154 - protein, 382 aa, Homo sapiens
ETGYVGLVNQAMTCYLNSLLQTLFMTPEFRNALYKWEFEESEEDPVTSIPYQLQRLFVLLQTSKKRAIETTDVTRSFGWDSSEAWQQHDVQELCRVMFDALEQKWKQTEQADLINELYQGKLKDYVRCLECGYEGWRIDTYLDIPLVIRPYGSSQAFASVEEALHAFIQPEILDGPNQYFCERCKKKCDARKGLRFLHFPYLLTLQLKRFDFDYTTMHRIKLNDRMTFPEELDMSTFIDVEDEKSPQTESCTDSGAENEGSCHSDQMSNDFSNDDGVDEGICLETNSGTEKISKSGLEKNSLIYELFSVMVHSGSAAGGHYYACIKSFSDEQWYSFNDQHVSRITQEDIKKTHGGSSGSRGYYSSAFASSTNAYMLIYRLKD

SEQ ID NO: 155 - protein, 350 aa, Homo sapiens
YTVGLRGLINLGNTCFMNCIVQALTHIPLLKDFFLSDKHKCIMTSPSLCLVCEMSSLFHAMYSGSRTPHIPYKLLHLIWIHAEHLAGYRQQDAHEFLIAILDVLHRHSKDDSGGQEANNPNCCNCIIDQIFTGGLQSDVTCQACHSVSTTIDPCWDISLDLPGSCATFDSQNPERADSTVSRDDHIPGIPSLTDCLQWFTRPEHLGSSAKIKCNSCQSYQESTKQLTMKKLPIVACFHLKRFEHVGKQRRKINTFISFPLELDMTPFLASTKESRMKEGQPPTDCVPNENKYSLFAVINHHGTLESGHYTSFIRQQKDQWFSCDDAIITKATIEDLLYSEGYLLFYHKQG

SEQ ID NO: 156 - protein, 306 aa, Homo sapiens
RVGAGLHNLGNTCFLNATIQCLTYTPPLANYLLSKEHARSCHQGSFCMLCVMQNHIVQAFANSGNAIKPVSFIRDLKKIARHFRFGNQEDAHEFLRYTIDAMQKACLNGCAKLDRQTQATTLVHQIFGGYLRSRVKCSVCKSVSDTYDPYLDVALEIRQAANIVRALELFVKADVLSGENAYMCAKCKKKVPASKRFTIHRTSNVLTLSLKRFANFSGGKITKDVGYPEFLNIRPYMSQNNGDPVMYGLYAVLVHSGYSCHAGHYYCYVKASNGQWYQMNDSLVHSSNVKVVLNQQAYVLFYLRIP

SEQ ID NO: 157 - protein, 411 aa, Homo sapiens
TPGVTGLRNLGNTCYMNSVLQVLSHLLIFRQCFLKLDLNQWLAMTASEKTRSCKHPPVTDTVVYQMNECQEKDTGFVCSRQSSLSSGLSGGASKGRKMELIQPKEPTSQYISLCHELHTLFQVMWSGKWALVSPFAMLHSVWRLIPAFRGYAQQDAQEFLCELLDKIQRELETTGTSLPALIPTSQRKLIKQVLNVVNNIFHGQLLSQVTCLACDNKSNTIEPFWDLSLEFPERYQCSGKDIASQPCLVTEMLAKFTETEALEGKIYVCDQCNSKRRRFSSKPVVLTEAQKQLMICHLPQVLRLHLKRFRWSGRNNREKIGVHVGFEEILNMEPYCCRETLKSLRPECFIYDLSAVVMHHGKGFGSGHYTAYCYNSEGGFWVHCNDSKLSMCTMDEVCKAQAYILFYTQRV

SEQ ID NO: 158 - protein, 337 aa, Homo sapiens
PALTGLRNLGNTCYMNSILQCLCNAPHLADYFNRNCYQDDINRSNLLGHKGEVAEEFGIIMKALWTGQYRYISPKDFKITIGKINDQFAGYSQQDSQELLLFLMDGLHEDLNKADNRKRYKEENNDHLDDFKAAEHAWQKHKQLNESIIVALFQGQFKSTVQCLTCHKKSRTFEAFMYLSLPLASTSKCTLQDCLRLFSKEEKLTDNNRFYCSHCRARRDSLKKIEIWKLPPVLLVHLKRFSYDGRWKQKLQTSVDFPLENLDLSQYVIGPKNNLKKYNLFSVSNHYGGLDGGHYTAYCKNAARQRWFKFDDHEVSDISVSSVKSSAAYILFYTSLG

SEQ ID NO: 159 - protein, 614 aa, Homo sapiens
QQLQGFSNLGNTCYMNAILQSLFSLQSFANDLLKQGIPWKKIPLNALIRRFAHLLVKKDICNSETKKDLLKKVKNAISATAERFSGYMQNDAHEFLSQCLDQLKEDMEKLNKTWKTEPVSGEENSPDISATRAYTCPVITNLEFEVQHSIICKACGEIIPKREQFNDLSIDLPRRKKPLPPRSIQDSLDLFFRAEELEYSCEKCGGKCALVRHKFNRLPRVLILHLKRYSFNVALSLNNKIGQQVIIPRYLTLSSHCTENTKPPFTLGWSAHMAISRPLKASQMVNSCITSPSTPSKKFTFKSKSSLALCLDSDSEDELKRSVALSQRLCEMLGNEQQQEDLEKDSKLCPIEPDKSELENSGFDRMSEEELLAAVLEISKRDASPSLSHEDDDKPTSSPDTGFAEDDIQEMPENPDTMETEKPKTITELDPASFTEITKDCDENKENKTPEGSQGEVDWLQQYDMEREREEQELQQALAQSLQEQEAWEQKEDDDLKRATELSLQEFNNSFVDALGSDEDSGNEDVFDMEYTEAEAEELKRNAETGNLPHSYRLISVVSHIGSTSSSGHYISDVYDIKKQAWFTYNDLEVSKIQEAAVQSDRDRSGYIFFYMHK

SEQ ID NO: 160 - protein, 300 aa, Homo sapiens
AVGAGLQNMGNTCYVNASLQCLTYTPPLANYMLSREHSQTCHRHKGCMLCTMQAHITRALHNPGHVIQPSQALAAGFHRGKQEDAHEFLMFTVDAMKKACLPGHKQVDHPSKDTTLIHQIFGGYWRSQIKCLHCHGISDTFDPYLDIALDIQAAQSVQQALEQLVKPEELNGENAYHCGVCLQRAPASKTLTLHTSAKVLILVLKRFSDVTGNKIAKNVQYPECLDMQPYMSQQNTGPLVYVLYAVLVHAGWSCHNGHYFSYVKAQEGQWYKMDDAEVTAASITSVLSQQAYVLFYIQKS

SEQ ID NO: 161 - protein, 300 aa, Homo sapiens
AVGAGLQNMGNTCYENASLQCLTYTLPLANYMLSREHSQTCQRPKCCMLCTMQAHITWALHSPGHVIQPSQALASGFHRGKQEDVHEFLMFTVDAMKKACLPGHKQVDHHSKDTTLIHQIFGGCWRSQIKCLHCHGISDTFDPYLDIALDIQAAQSVKQALEQLVKPEELNGENAYHCGLCLQRAPASNTLTLHTSAKVLILVLKRFSDVAGNKLAKNVQYPECLDMQPYMSQQNTGPLVYVLYAVLVHAGWSCHDGHYFSYVKAQEGQWYKMDDAEVTVCSITSVLSQQAYVLFYIQKS

SEQ ID NO: 162 - protein, 402 aa, Homo sapiens
APSKGLSNEPGQNSCFLNSALQVLWHLDIFRRSFRQLTTHKCMGDSCIFCALKGIFNQFQCSSEKVLPSDTLRSALAKTFQDEQRFQLGIMDDAAECFENLLMRIHFHIADETKEDICTAQHCISHQKFAMTLFEQCVCTSCGATSDPLPFIQMVHYISTTSLCNQAICMLERREKPSPSMFGELLQNASTMGDLRNCPSNCGERIRIRRVLMNAPQIITIGLVWDSDHSDLAEDVIHSLGTCLKLGDLFFRVTDDRAKQSELYLVGMICYYGKHYSTFFFQTKIRKWMYFDDAHVKEIGPKWKDVVTKCIKGHYQPLLLLYADPQGTPVSTQDLPPQAEFQSYSRTCYDSEDSGREPSISSDTRTDSSTESYPYKHSHHESVVSHFSSDSQGTVIYNVEND

SEQ ID NO: 163 - protein, 336 aa, Homo sapiens
LPGIVGLNNIKANDYANAVLQALSNVPPLRNYFLEEDNYKNIKRPPGDIMFLLVQRFGELMRKLWNPRNFKAHVSPHEMLQAVVLCSKKTFQITKQGDGVDFLSWFLNALHSALGGTKKKKKTIVTDVFQGSMRIFTKKLPHPDLPAEEKEQLLHNDEYQETMVESTFMYLTLDLPTAPLYKDEKEQLIIPQVPLFNILAKFNGITEKEYKTYKENFLKRFQLTKLPPYLIFCIKRFTKNNFFVEKNPTIVNFPITNVDLREYLSEEVQAVHKNTTYDLIANIVHDGKPSEGSYRIHVLHHGTGKWYELQDLQVTDILPQMITLSEAYIQIWKRRD

SEQ ID NO: 164 - protein, 492 aa, Homo sapiens
SDTGKIGLINLGNTCYVNSILQALFMASDFRHCVLRLTENNSQPLMTKLQWLFGFLEHSQRPAISPENFLSASWTPWFSPGTQQDCSEYLKYLLDRLHEEEKTGTRICQKLKQSSSPSPPEEPPAPSSTSVEKMFGGKIVTRICCLCCLNVSSREEAFTDLSLAFPPPERCRRRRLGSVMRPTEDITARELPPPTSAQGPGRVGPRRQRKHCITEDTPPTSLYIEGLDSKEAGGQSSQEERIEREEEGKEERTEKEEVGEEEESTRGEGEREKEEEVEEEEEKVEKETEKEAEQEKEEDSLGAGTHPDAAIPSGERTCGSEGSRSVLDLVNYFLSPEKLTAENRYYCESCASLQDAEKVVELSQGPCYLILTLLRFSFDLRTMRRRKILDDVSIPLLLRLPLAGGRGQAYDLCSVVVHSGVSSESGHYYCYAREGAARPAASLGTADRPEPENQWYLFNDTRVSFSSFESVSNVTSFFPKDTAYVLFYRQRP

SEQ ID NO: 165 - protein, 651 aa, Homo sapiens
EQPGLCGLSNLGNTCFMNSAIQCLSNTPPLTEYFLNDKYQEELNFDNPLGMRGEIAKSYAELIKQMWSGKFSYVTPRAFKTQVGRFAPQFSGYQQQDCQELLAFLLDGLHEDLNRIRKKPYIQLKDADGRPDKVVAEEAWENHLKRNDSIIVDIFHGLFKSTLVCPECAKISVTFDPFCYLTLPLPMKKERTLEVYLVRMDPLTKPMQYKVVVPKIGNILDLCTALSALSGIPADKMIVTDIYNHRFHRIFAMDENLSSIMERDDIYVFEININRTEDTEHVIIPVCLREKFRHSSYTHHTGSSLFGQPFLMAVPRNNTEDKLYNLLLLRMCRYVKISTETEETEGSLHCCKDQNINGNGPNGIHEEGSPSEMETDEPDDESSQDQELPSENENSQSEDSVGGDNDSENGLCTEDTCKGQLTGHKKRLFTFQFNNLGNTDINYIKDDTRHIRFDDRQLRLDERSFLALDWDPDLKKRYFDENAAEDFEKHESVEYKPPKKPFVKLKDCIELFTTKEKLGAEDPWYCPNCKEHQQATKKLDLWSLPPVLVVHLKRFSYSRYMRDKLDTLVDFPINDLDMSEFLINPNAGPCRYNLIAVSNHYGGMGGGHYTAFAKNKDDGKWYYFDDSSVSTASEDQIVSKAAYVLFYQRQD

SEQ ID NO: 166 - protein, 604 aa, Homo sapiens
QLQQGFPNLGNTCYMNAVLQSLFAIPSFADDLLTQGVPWEYIPFEALIMTLTQLLALKDFCSTKIKRELLGNVKKVISAVAEIFSGNMQNDAHEFLGQCLDQLKEDMEKLNATLNTGKECGDENSSPQMHVGSAATKVFVCPVVANFEFELQLSLICKACGHAVLKVEPNNYLSINLHQETKPLPLSIQNSLDLFFKEEELEYNCQMCKQKSCVARHTFSRLSRVLIIHLKRYSFNNAWLLVKNNEQVYIPKSLSLSSYCNESTKPPLPLSSSAPVGKCEVLEVSQEMISEINSPLTPSMKLTSESSDSLVLPVEPDKNADLQRFQRDCGDASQEQHQRDLENGSALESELVHFRDRAIGEKELPVADSLMDQGDISLPVMYEDGGKLISSPDTRLVEVHLQEVPQHPELQKYEKTNTFVEFNFDSVTESTNGFYDCKENRIPEGSQGMAEQLQQCIEESIIDEFLQQAPPPGVRKLDAQEHTEETLNQSTELRLQKADLNHLGALGSDNPGNKNILDAENTRGEAKELTRNVKMGDPLQAYRLISVVSHIGSSPNSGHYISDVYDFQKQAWFTYNDLCVSEISETKMQEARLHSGYIFFYMHN

SEQ ID NO: 167 - protein, 841 aa, Homo sapiens
KGATGLSNLGNTCFMNSSIQCVSNTQPLTQYFISGRHLYELNRTNPIGMKGHMAKCYGDLVQELWSGTQKSVAPLKLRRTIAKYAPKFDGFQQQDSQELLAFLLDGLHEDLNRVHEKPYVELKDSDGRPDWEVAAEAWDNHLRRNRSIIVDLFHGQLRSQVKCKTCGHISVRFDPNFLSLPLPMDSYMDLEITVIKLDGTTPVRYGLRLNMDEKYTGLKKQLRDLCGLNSEQILLAEVHDSNIKNFPQDNQKVQLSVSGFLCAFEIPVPSSPISASSPTQIDFSSSPSTNGMFTLTTNGDLPKPIFIPNGMPNTVVPCGTEKNFTNGMVNGHMPSLPDSPFTGYIIAVHRKMMRTELYFLSPQENRPSLFGMPLIVPCTVHTRKKDLYDAVWIQVSWLARPLPPQEASIHAQDRDNCMGYQYPFTLRVVQKDGNSCAWCPQYRFCRGCKIDCGEDRAFIGNAYIAVDWHPTALHLRYQTSQERVVDKHESVEQSRRAQAEPINLDSCLRAFTSEEELGESEMYYCSKCKTHCLATKKLDLWRLPPFLIIHLKRFQFVNDQWIKSQKIVRFLRESFDPSAFLVPRDPALCQHKPLTPQGDELSKPRILAREVKKVDAQSSAGKEDMLLSKSPSSLSANISSSPKGSPSSSRKSGTSCPSSKNSSPNSSPRTLGRSKGRLRLPQIGSKNKPSSSKKNLDASKENGAGQICELADALSRGHMRGGSQPELVTPQDHEVALANGFLYEHEACGNGCGDGYSNGQLGNHSEEDSTDDQREDTHIKPIYNLYAISCHSGILSGGHYITYAKNPNCKWYCYNDSSCEELHPDEIDTDSAYILFYEQQG

SEQ ID NO: 168 - protein, 446 aa, Homo sapiens
APTKGLLNEPGQNSCFLNSAVQVLWQLDIFRRSLRVLTGHVCQGDACIFCALKTIFAQFQHSREKALPSDNIRHALAESFKDEQRFQLGLMDDAAECFENMLERIHFHIVPSRDADMCTSKSCITHQKFAMTLYEQCVCRSCGASSDPLPFTEFVRYISTTALCNEVERMLERHERFKPEMFAELLQAANTTDDYRKCPSNCGQKIKIRRVLMNCPEIVTIGLVWDSEHSDLTEAVVRNLATHLYLPGLFYRVTDENAKNSELNLVGMICYTSQHYCAFAFHTKSSKWVFFDDANVKEIGTRWKDVVSKCIRCHFQPLLLFYANPDGTAVSTEDALRQVISWSHYKSVAENMGCEKPVIHKSDNLKENGFGDQAKQRENQKFPTDNISSSNRSHSHTGVGKGPAKLSHIDQREKIKDISRECALKAIEQKNLLSSQRKDLEKGQRK

SEQ ID NO: 169 - protein, 300 aa, Homo sapiens
AVGAGLQNMGNTCYVNASLQCLTYTPPLANYMLSREHSQTCHRHKGCMLCTMQAHITRALHNPGHVIQPSQALAAGFHRGKQEDAHEFLMFTVDAMKKACLPGHKQVDHHSKDTTLIHQIFGGYWRSQIKCLHCHGISDTFDPYLDIALDIQAAQSVQQALEQLVKPEELNGENAYHCGVCLQRAPASKTLTLHTSAKVLILVLKRFSDVTGNKIAKNVQYPECLDMQPYMSQPNTGPLVYVLYAVLVHAGWSCHNGHYFSYVKAQEGQWYKMDDAEVTASSITSVLSQQAYVLFYIQKS

SEQ ID NO: 170 - protein, 537 aa, Homo sapiens
FGPGYTGIRNLGNSCYLNSVVQVLFSIPDFQRKYVDKLEKIFQNAPTDPTQDFSTQVAKLGHGLLSGEYSKPVPESGDGERVPEQKEVQDGIAPRMFKALIGKGHPEFSTNRQQDAQEFFLHLINMVERNCRSSENPNEVFRFLVEEKIKCLATEKVKYTQRVDYIMQLPVPMDAALNKEELLEYEEKKRQAEEEKMALPELVRAQVPFSSCLEAYGAPEQVDDFWSTALQAKSVAVKTTRFASFPDYLVIQIKKFTFGLDWVPKKLDVSIEMPEELDISQLRGTGLQPGEEELPDIAPPLVTPDEPKGSLGFYGNEDEDSFCSPHFSSPTSPMLDESVIIQLVEMGFPMDACRKAVYYTGNSGAEAAMNWVMSHMDDPDFANPLILPGSSGPGSTSAAADPPPEDCVTTIVSMGFSRDQALKALRATNNSLERAVDWIFSHIDDLDAEAAMDISEGRSAADSISESVPVGPKVRDGPGKYQLFAFISHMGTSTMCGHYVCHIKKEGRWVIYNDQKVCASEKPPKDLGYIYFYQRVA

SEQ ID NO: 171 - protein, 536 aa, Homo sapiens
ARGLTGLKNIGNTCYMNAALQALSNCPPLTQFFLDCGGLARTDKKPAICKSYLKLMTELWHKSRPGSVVPTTLFQGIKTVNPTFRGYSQQDAQEFLRCLMDLLHEELKEQVMEVEEDPQTITTEETMEEDKSQSDVDFQSCESCSNSDRAENENGSRCFSEDNNETTMLIQDDENNSEMSKDWQKEKMCNKINKVNSEGEFDKDRDSISETVDLNNQETVKVQIHSRASEYITDVHSNDLSTPQILPSNEGVNPRLSASPPKSGNLWPGLAPPHKKAQSASPKRKKQHKKYRSVISDIFDGTIISSVQCLTCDRVSVTLETFQDLSLPIPGKEDLAKLHSSSHPTSIVKAGSCGEAYAPQGWIAFFMEYVKRFVVSCVPSWFWGPVVTLQDCLAAFFARDELKGDNMYSCEKCKKLRNGVKFCKVQNFPEILCIHLKRFRHELMFSTKISTHVSFPLEGLDLQPFLAKDSPAQIVTYDLLSVICHHGTASSGHYIAYCRNNLNNLWYEFDDQSVTEVSESTVQNAEAYVLFYRKSS

SEQ ID NO: 172 - protein, 353 aa, Homo sapiens
LGSGHVGLRNLGNTCFLNAVLQCLSSTRPLRDFCLRRDFRQEVPGGGRAQELTEAFADVIGALWHPDSCEAVNPTRFRAVFQKYVPSFSGYSQQDAQEFLKLLMERLHLEINRRGRRAPPILANGPVPSPPRRGGALLEEPELSDDDRANLMWKRYLEREDSKIVDLFVGQLKSCLKCQACGYRSTTFEVFCDLSLPIPKKGFAGGKVSLRDCFNLFTKEEELESENAPVCDRCRQKTRSTKKLTVQRFPRILVLHLNRFSASRGSIKKSSVGVDFPLQRLSLGDFASDKAGSPVYQLYALCNHSGSVHYGHYTALCRCQTGWHVYNDSRVSPVSENQVASSEGYVLFYQLMQ

SEQ ID NO: 173 - protein, 300 aa, Homo sapiens
AVGAGLQNMGNTCYENASLQCLTYTLPLANYMLSREHSQTCQRPKCCMLCTMQAHITWALHSPGHVIQPSQALAAGFHRGKQEDVHEFLMFTVDAMKKACLPGHKQVDHHSKDTTLIHQIFGGCWRSQIKCLHCHGISDTFDPYLDIALDIQAAQSVKQALEQLVKPEELNGENAYHCGLCLQRAPASNTLTLHTSAKVLILVLKRFSDVAGNKLAKNVQYPECLDMQPYMSQQNTGPLVYVLYAVLVHAGWSCHDGYYFSYVKAQEGQWYKMDDAEVTVCSITSVLSQQAYVLFYIQKS

SEQ ID NO: 174 - protein, 300 aa, Homo sapiens; identical to SEQ ID NO: 169

SEQ ID NO: 175 - protein, 334 aa, Homo sapiens
EHYFGLVNFGNTCYCNSVLQALYFCRPFREKVLAYKSQPRKKESLLTCLADLFHSIATQKKKVGVIPPKKFITRLRKENELFDNYMQQDAHEFLNYLLNTIADILQEERKQEKQNGRLPNGNIDNENNNSTPDPTWVHEIFQGTLTNETRCLTCETISSKDEDFLDLSVDVEQNTSITHCLRGFSNTETLCSEYKYYCEECRSKQEAHKRMKVKKLPMILALHLKRFKYMDQLHRYTKLSYRVVFPLELRLFNTSGDATNPDRMYDLVAVVVHCGSGPNRGHYIAIVKSHDFWLLFDDDIVEKIDAQAIEEFYGLTSDISKNSESGYILFYQSR

SEQ ID NO: 176 - protein, 300 aa, Homo sapiens
AVGAGLQNMGNTCYVNASLQCLTYTPPLANYMLSREHSQTCHRHKGCMLCTMQAHITRALHNPGHVIQPSQALAAGFHRGKQEDAHEFLMFTVDAMKKACLPGHKQVDHHSKDTTLIHQIFGGYWRSQIKCLHCHGISDTFDPYLDIALDIQAAQSVQQALEQLVKPEELNGENAYHCGVCLQRAPASKMLTLLTSAKVLILVLKRFSDVTGNKIAKNVQYPECLDMQPYMSQPNTGPLVYVLYAVLVHAGWSCHNGHYFSYVKAQEGQWYKMDDAEVTASSITSVLSQQAYVLFYIQKS

SEQ ID NO: 177 - protein, 546 aa, Homo sapiens
PRGLTGMKNLGNSCYMNAALQALSNCPPLTQFFLECGGLVRTDKKPALCKSYQKLVSEVWHKKRPSYVVPTSLSHGIKLVNPMFRGYAQQDTQEFLRCLMDQLHEELKEPVVATVALTEARDSDSSDTDEKREGDRSPSEDEFLSCDSSSDRGEGDGQGRGGGSSQAETELLIPDEAGRAISEKERMKDRKFSWGQQRTNSEQVDEDADVDTAMAALDDQPAEAQPPSPRSSSPCRTPEPDNDAHLRSSSRPCSPVHHHEGHAKLSSSPPRASPVRMAPSYVLKKAQVLSAGSRRRKEQRYRSVISDIFDGSILSLVQCLTCDRVSTTVETFQDLSLPIPGKEDLAKLHSAIYQNVPAKPGACGDSYAAQGWLAFIVEYIRRFVVSCTPSWFWGPVVTLEDCLAAFFAADELKGDNMYSCERCKKLRNGVKYCKVLRLPEILCIHLKRFRHEVMYSFKINSHVSFPLEGLDLRPFLAKECTSQITTYDLLSVICHHGTAGSGHYIAYCQNVINGQWYEFDDQYVTEVHETVVQNAEGYVLFYRKSS

SEQ ID NO: 178 - protein, 334 aa, Homo sapiens
EHYFGLVNFGNTCYCNSVLQALYFCRPFRENVLAYKAQQKKKENLLTCLADLFHSIATQKKKVGVIPPKKFISRLRKENDLFDNYMQQDAHEFLNYLLNTIADILQEEKKQEKQNGKLKNGNMNEPAENNKPELTWVHEIFQGTLTNETRCLNCETVSSKDEDFLDLSVDVEQNTSITHCLRDFSNTETLCSEQKYYCETCCSKQEAQKRMRVKKLPMILALHLKRFKYMEQLHRYTKLSYRVVFPLELRLFNTSSDAVNLDRMYDLVAVVVHCGSGPNRGHYITIVKSHGFWLLFDDDIVEKIDAQAIEEFYGLTSDISKNSESGYILFYQSR

SEQ ID NO: 179 - protein, 363 aa, Homo sapiens
GKKKGIQGHYNSCYLDSTLFCLFAFSSVLDTVLLRPKEKNDVEYYSETQELLRTEIVNPLRIYGYVCATKIMKLRKILEKVEAASGFTSEEKDPEEFLNILFHHILRVEPLLKIRSAGQKVQDCYFYQIFMEKNEKVGVPTIQQLLEWSFINSNLKFAEAPSCLIIQMPRFGKDFKLFKKIFPSLELNITDLLEDTPRQCRICGGLAMYECRECYDDPDISAGKIKQFCKTCNTQVHLHPKRLNHKYNPVSLPKDLPDWDWRHGCIPCQNMELFAVLCIETSHYVAFVKYGKDDSAWLFFDSMADRDGGQNGFNIPQVTPCPEVGEYLKMSLEDLHSLDSRRIQGCARRLLCDAYMCMYQSPT

SEQ ID NO: 180 - protein, 631 aa, Homo sapiens
ITVKGLSNLGNTCFFNAVMQNLSQTPVLRELLKEVKMSGTIVKIEPPDLALTEPLEINLEPPGPLTLAMSQFLNEMQETKKGVVTPKELFSQVCKKAVRFKGYQQQDSQELLRYLLDGMRAEEHQRVSKGILKAFGNSTEKLDEELKNKVKDYEKKKSMPSFVDRIFGGELTSMIMCDQCRTVSLVHESFLDLSLPVLDDQSGKKSVNDKNLKKTVEDEDQDSEEEKDNDSYIKERSDIPSGTSKHLQKKAKKQAKKQAKNQRRQQKIQGKVLHLNDICTIDHPEDSEYEAEMSLQGEVNIKSNHISQEGVMHKEYCVNQKDLNGQAKMIESVTDNQKSTEEVDMKNINMDNDLEVLTSSPTRNLNGAYLTEGSNGEVDISNGFKNLNLNAALHPDEINIEILNDSHTPGTKVYEVVNEDPETAFCTLANREVFNTDECSIQHCLYQFTRNEKLRDANKLLCEVCTRRQCNGPKANIKGERKHVYTNAKKQMLISLAPPVLTLHLKRFQQAGFNLRKVNKHIKFPEILDLAPFCTLKCKNVAEENTRVLYSLYGVVEHSGTMRSGHYTAYAKARTANSHLSNLVLHGDIPQDFEMESKGQWFHISDTHVQAVPTTKVLNSQAYLLFYERIL

SEQ ID NO: 181 - protein, 291 aa, Homo sapiens
YRYKDSLKEDIQKADLVISHAGAGSCLETLEKGKPLVVVINEKLMNNHQLELAKQLHKEGHLFYCTCRVLTCPGQAKSIASAPGKCQDSAALTSTAFSGLDFGLLSGYLHKQALVTATHPTCTLLFPSCHAFFPLPLTPTLYKMHKGWKNYCSQKSLNEASMDEYLGSLGLFRKLTAKDASCLFRAISEQLFCSQVHHLEIRKACVSYMRENQQTFESYVEGSFEKYLERLGDPKESAGQLEIRALSLIYNRDFILYRFPGKPPTYVTDNGYEDKILLCYSSSGHYDSVYS

SEQ ID NO: 182 - protein, 212 aa, Homo sapiens
QGLSSRTRVRELQGQIAAITGIAPGGQRILVGYPPECLDLSNGDTILEDLPIQSGDMLIIEEDQTRPRSSPAFTKRGASSYVRETLPVLTRTVVPADNSCLFTSVYYVVEGGVLNPACAPEMRRLIAQIVASDPDFYSEAILGKTNQEYCDWIKRDDTWGGAIEISILSKFYQCEICVVDTQTVRIDRFGEDAGYTKRVLLIYDGIHYDPLQ

SEQ ID NO: 183 - protein, 375 aa, Homo sapiens
HREAAAVPAAKMPAFSSCFEVVSGAAAPASAAAGPPGASCKPPLPPHYTSTAQITVRALGADRLLLHGPDPVPGAAGSAAAPRGRCLLLAPAPAAPVPPRRGSSAWLLEELLRPDCPEPAGLDATREGPDRNFRLSEHRQALAAAKHRGPAATPGSPDPGPGPWGEEHLAERGPRGWERGGDRCDAPGGDAARRPDPEAEAPPAGSIEAAPSSAAEPVIVSRSDPRDEKLALYLAEVEKQDKYLRQRNKYRFHIIPDGNCLYRAVSKTVYGDQSLHRELREQTVHYIADHLDHFSPLIEGDVGEFIIAAAQDGAWAGYPELLAMGQMLNVNIHLTTGGRLESPTVSTMIHYLGPEDSLRPSIWLSWLSNGHYDAV

SEQ ID NO: 184 - protein, 213 aa, Homo sapiens
QKHREELEQLKLTTKENKIDSVAVNISNLVLENQPPRISKAQKRREKKAALEKEREERIAEAEIENLTGARHMESEKLAQILAARQLEIKQIPSDGHCMYKAIEDQLKEKDCALTVVALRSQTAEYMQSHVEDFLPFLTNPNTGDMYTPEEFQKYCEDIVNTAAWGGQLELRALSHILQTPIEIIQADSPPIIVGEEYSKKPLILVYMRHAYG

SEQ ID NO: 185 - protein, 204 aa, Homo sapiens
QELEKFQDDSSIESVVEDLAKMNLENRPPRSSKAHRKRERMESEERERQESIFQAEMSEHLAGFKREEEEKLAAILGARGLEMKAIPADGHCMYRAIQDQLVFSVSVEMLRCRTASYMKKHVDEFLPFFSNPETSDSFGYDDFMIYCDNIVRTTAWGGQLELRALSHVLKTPIEVIQADSPTLIIGEEYVKKPIILVYLRYAYS

SEQ ID NO: 186 - protein, 311 aa, Homo sapiens
SDYEQLRQVHTANLPHVFNEGRGPKQPEREPQPGHKVERPCLQRQDDIAQEKRLSRGISHASSAIVSLARSHVASECNNEQFPLEMPIYTFQLPDLSVYSEDFRSFIERDLIEQATMVALEQAGRLNWWSTVCTSCKRLLPLATTGDGNCLLHAASLGMWGFHDRDLVLRKALYTMMRTGAEREALKRRWRWQQTQQNKEEEWEREWTELLKLASSEPRTHFSKNGGTGGGVDNSEDPVYESLEEFHVFVLAHILRRPIVVVADTMLRDSGGEAFAPIPFGGIYLPLEVPPNRCHCSPLVLAYDQAHFSAL

SEQ ID NO: 187 - protein, 154 aa, Homo sapiens
MEAAVGVPDGGDQGGAGPREDATPMDAYLRKLGLYRKLVAKDGSCLFRAVAEQVLHSQSRHVEVRMACIHYLRENREKFEAFIEGSFEEYLKRLENPQEWVGQVEISALSLMYRKDFIIYREPNVSPSQVTENNFPEKVLLCFSNGNHYDIVYP

SEQ ID NO: 188 - protein, 188 aa, Homo sapiens
MSRKQAAKSRPGSGSRKAEAERKRDERAARRALAKERRNRPESGGGGGCEEEFVSFANQLQALGLKLREVPGDGNCLFRALGDQLEGHSRNHLKHRQETVDYMIKQREDFEPFVEDDIPFEKHVASLAKPGTFAGNDAIVAFARNHQLNVVIHQLNAPLWQIRGTEKSSVRELHIAYRYGEHYDSVRR

SEQ ID NO: 189 - protein, 362 aa, Homo sapiens
MTLDMDAVLSDFVRSTGAEPGLARDLLEGKNWDVNAALSDFEQLRQVHAGNLPPSFSEGSGGSRTPEKGFSDREPTRPPRPILQRQDDIVQEKRLSRGISHASSSIVSLARSHVSSNGGGGGSNEHPLEMPICAFQLPDLTVYNEDFRSFIERDLIEQSMLVALEQAGRLNWWVSVDPTSQRLLPLATTGDGNCLLHAASLGMWGFHDRDLMLRKALYALMEKGVEKEALKRRWRWQQTQQNKESGLVYTEDEWQKEWNELIKLASSEPRMHLGTNGANCGGVESSEEPVYESLEEFHVFVLAHVLRRPIVVVADTMLRDSGGEAFAPIPFGGIYLPLEVPASQCHRSPLVLAYDQAHFSAL

SEQ ID NO: 190 - protein, 338 aa, Homo sapiens
MTILPKKKPPPPDADPANEPPPPGPMPPAPRRGGGVGVGGGGTGVGGGDRDRDSGVVGARPRASPPPQGPLPGPPGALHRWALAVPPGAVAGPRPQQASPPPCGGPGGPGGGPGDALGAAAAGVGAAGVVVGVGGAVGVGGCCSGPGHSKRRRQAPGVGAVGGGSPEREEVGAGYNSEDEYEAAAARIEAMDPATVEQQEHWFEKALRDKKGFIIKQMKEDGACLFRAVADQVYGDQDMHEVVRKHCMDYLMKNADYFSNYVTEDFTTYINRKRKNNCHGNHIEMQAMAEMYNRPVEVYQYSTGTSAVEPINTFHGIHQNEDEPIRVSYHRNIHYNSV

SEQ ID NO: 191 - protein, 260 aa, Homo sapiens
MAEQVLPQALYLSNMRKAVKIRERTPEDIFKPTNGIIHHFKTMHRYTLEMFRTCQFCPQFREIIHKALIDRNIQATLESQKKLNWCREVRKLVALKTNGDGNCLMHATSQYMWGVQDTDLVLRKALFSTLKETDTRNFKFRWQLESLKSQEFVETGLCYDTRNWNDEWDNLIKMASTDTPMARSGLQYNSLEEIHIFVLCNILRRPIIVISDKMLRSLESGSNFAPLKVGGIYLPLHWPAQECYRYPIVLGYDSHHFVPL

SEQ ID NO: 192 - protein, 589 aa, Homo sapiens
MSERGIKWACEYCTYENWPSAIKCTMCRAQRPSGTIITEDPFKSGSSDVGRDWDPSSTEGGSSPLICPDSSARPRVKSSYSMENANKWSCHMCTYLNWPRAIRCTQCLSQRRTRSPTESPQSSGSGSRPVAFSVDPCEEYNDRNKLNTRTQHWTCSVCTYENWAKAKRCVVCDHPRPNNIEAIELAETEEASSIINEQDRARWRGSCSSGNSQRRSPPATKRDSEVKMDFQRIELAGAVGSKEELEVDFKKLKQIKNRMKKTDWLFLNACVGVVEGDLAAIEAYKSSGGDIARQLTADEVRLLNRPSAFDVGYTLVHLAIRFQRQDMLAILLTEVSQQAAKCIPAMVCPELTEQIRREIAASLHQRKGDFACYFLTDLVTFTLPADIEDLPPTVQEKLFDEVLDRDVQKELEEESPIINWSLELATRLDSRLYALWNRTAGDCLLDSVLQATWGIYDKDSVLRKALHDSLHDCSHWFYTRWKDWESWYSQSFGLHFSLREEQWQEDWAFILSLASQPGASLEQTHIFVLAHILRRPIIVYGVKYYKSFRGETLGYTRFQGVYLPLLWEQSFCWKSPIALGYTRGHFSAL

SEQ ID NO: 193 - protein, 298 aa, Homo sapiens
PASGSVSIECTECGQRHEQQQLLGVEEVTDPDVVLHNLLRNALLGVTGAPKKNTELVKVMGLSNYHCKLLSPILARYGMDKQTGRAKLLRDMNQGELFDCALLGDRAFLIEPEHVNTVGYGKDRSGSLLYLHDTLEDIKRANKSQECLIPVHVDGDGHCLVHAVSRALVGRELFWHALRENLKQHFQQHLARYQALFHDFIDAAEWEDIINECDPLFVPPEGVPLGLRNIHIFGLANVLHRPIILLDSLSGMRSSGDYSATFLPGLIPAEKCTGKDGHLNKPICIAWSSSGRNHYIPL

SEQ ID NO: 194 - protein, 227 aa, Homo sapiens
QRWLPLEANPEVTNQFLKQLGLHPNWQFVDVYGMDPELLSMVPRPVCAVLLLFPITEKYEVFRTEEEEKIKSQGQDVTSSVYFMKQTISNACGTIGLIHAIANNKDKMHFESGSTLKKFLEESVSMSPEERARYLENYDAIRVTHETSAHEGQTEAPSIDEKVDLHFIALVHVDGHLYELDGRKPFPINHGETSDETLLEDAIEVCKKFMERDPDELRFNAIALSAA

SEQ ID NO: 195 - protein, 223 aa, Homo sapiens
GEWCLMESDPGVFTELIKGFGCRGAQVEEIWSLEPENFEKLKPVHGLIFLFKWQPGEEPAGSVVQDSRLDTIFFAKQVINNACATQAIVSVLLNCTHQDVHLGETLSEFKEFSQSFDAAMKGLALSNSDVIRQVHNSFARQQMFEFDTKTSAKEEDAFHFVSYVPVNGRLYELDGLREGPIDLGACNQDDWISAVRPVIEKRIQKYSEGEIRFNLMAIVSDRK

SEQ ID NO: 196 - protein, 165 aa, Homo sapiens
ESIFHEKQEGSLCAQHCLNNLLQGEYFSPVELSSIAHQLDEEERMRMAEGGVTSEDYRTFLQQPSGNMDDSGFFSIQVISNALKVWGLELILFNSPEYQRLRIDPINERSFICNYKEHWFTVRKLGKQWFNLNSLLTGPELISDTYLALFLAQLQQEGYSIFVVK

SEQ ID NO: 197 - protein, 163 aa, Homo sapiens
PTVYHERQRLELCAVHALNNVLQQQLFSQEAADEICKRLAPDSRLNPHRSLLGTGNYDVNVIMAALQGLGLAAVWWDRRRPLSQLALPQVLGLILNLPSPVSLGLLSLPLRRRHWVALRQVDGVYYNLDSKLRAPEALGDEDGVRAFLAAALAQGLCEVLLVV

SEQ ID NO: 198 - protein, 170 aa, Homo sapiens
PQAAPPQIYHEKQRRELCALHALNNVFQDSNAFTRDTLQEIFQRLSPNTMVTPHKKSMLGNGNYDVNVIMAALQTKGYEAVWWDKRRDVGVIALTNVMGFIMNLPSSLCWGPLKLPLKRQHWICVREVGGAYYNLDSKLKMPEWIGGESELRKFLKHHLRGKNCELLLVV

SEQ ID NO: 199 - protein, 165 aa, Homo sapiens
DFIFHEKQEGFLCAQHCLNNLLQGEYFSPVELASIAHQLDEEERMRMAEGGVTSEEYLAFLQQPSENMDDTGFFSIQVISNALKFWGLEIIHFNNPEYQKLGIDPINERSFICNYKQHWFTIRKFGKHWFNLNSLLAGPELISDTCLANFLARLQQQAYSVFVVK

SEQ ID NO: 200 - protein, 419 aa, Homo sapiens
CRWTQGFVFSESEGSALEQFEGGPCAVIAPVQAFLLKKLLFSSEKSSWRDCSEEEQKELLCHTLCDILESACCDHSGSYCLVSWLRGKTTEETASISGSPAESSCQVEHSSALAVEELGFERFHALIQKRSFRSLPELKDAVLDQYSMWGNKFGVLLFLYSVLLTKGIENIKNEIEDASEPLIDPVYGHGSQSLINLLLTGHAVSNVWDGDRECSGMKLLGIHEQAAVGFLTLMEALRYCKVGSYLKSPKFPIWIVGSETHLTVFFAKDMALVAPEAPSEQARRVFQTYDPEDNGFIPDSLLEDVMKALDLVSDPEYINLMKNKLDPEGLGIILLGPFLQEFFPDQGSSGPESFTVYHYNGLKQSNYNEKVMYVEGTAVVMGFEDPMLQTDDTPIKRCLQTKWPYIELLWTTDRSPSLN

SEQ ID NO: 201 - protein, 356 aa, Homo sapiens
YCVKWIPWKGEQTPIITQSTNGPCPLLAIMNILFLQWKVKLPPQKEVITSDELMAHLGNCLLSIKPQEKSEGLQLNFQQNVDDAMTVLPKLATGLDVNVRFTGVSDFEYTPECSVFDLLGIPLYHGWLVDPQSPEAVRAVGKLSYNQLVERIITCKHSSDTNLVTEGLIAEQFLETTAAQLTYHGLCELTAAAKEGELSVFFRNNHFSTMTKHKSHLYLLVTDQGFLQEEQVVWESLHNVDGDSCFCDSDFHLSHSLGKGPGAEGGSGSPETQLQVDQDYLIALSLQQQQPRGPLGLTDLELAQQLQQEEYQQQQAAQPVRMRTRVLSLQGRGATSGRPAGERRQRPKHESDCILL

SEQ ID NO: 202 - protein, 379 aa, Homo sapiens
YHIKWIQWKEENTPIITQNENGPCPLLAILNVLLLAWKVKLPPMMEIITAEQLMEYLGDYMLDAKPKEISEIQRLNYEQNMSDAMAILHKLQTGLDVNVRFTGVRVFEYTPECIVFDLLDIPLYHGWLVDPQIDDIVKAVGNCSYNQLVEKIISCKQSDNSELVSEGFVAEQFLNNTATQLTYHGLCELTSTVQEGELCVFFRNNHFSTMTKYKGQLYLLVTDQGFLTEEKVVWESLHNVDGDGNFCDSEFHLRPPSDPETVYKGQQDQIDQDYLMALSLQQEQQSQEINWEQIPEGISDLELAKKLQEEEDRRASQYYQEQEQAAAAAAAASTQAQQGQPAQASPSSGRQSGNSERKRKEPREKDKEKEKEKNSCVIL

SEQ ID NO: 203 - protein, 334 aa, Homo sapiens
FCCFNEEWKLQSFSFSNTASLKYGIVQNKGGPCGVLAAVQGCVLQKLLFEGDSKADCAQGLQPSDAHRTRCLVLALADIVWRAGGRERAVVALASRTQQFSPTGKYKADGVLETLTLHSLTCYEDLVTFLQQSIHQFEVGPYGCILLTLSAILSRSTELIRQDFDVPTSHLIGAHGYCTQELVNLLLTGKAVSNVFNDVVELDSGDGNITLLRGIAARSDIGFLSLFEHYNMCQVGCFLKTPRFPIWVVCSESHFSILFSLQPGLLRDWRTERLFDLYYYDGLANQQEQIRLTIDTTQTISEDTDNDLVPPLELCIRTKWKGASVNWNGSDPIL

SEQ ID NO: 204 - protein, 167 aa, Homo sapiens
VVPGRLCPQFLQLASANTARGVETCGILCGKLMRNEFTITHVLIPKQSAGSDYCNTENEEELFLIQDQQGLITLGWIHTHPTQTAFLSSVDLHTHCSYQMMLPESVAIVCSPKFQETGFFKLTDHGLEEISSCRQKGFHPHSKDPPLFCSCSHVTVVDRAVTITDLR

SEQ ID NO: 205 - protein, 200 aa, Homo sapiens
VAVSSNVLFLLDFHSHLTRSEVVGYLGGRWDVNSQMLTVLRAFPCRSRLGDAETAAAIEEEIYQSLFLRGLSLVGWYHSHPHSPALPSLQDIDAQMDYQLRLQGSSNGFQPCLALLCSPYYSGNPGPESKISPFWVMPPPEMLLVEFYKGSPDLVRLQEPWSQEHTYLDKLKISLASRTPKDQSLCHVLEQVCGVLKQGS

SEQ ID NO: 206 - protein, 201 aa, Homo sapiens
ALAYVKMCLHAARYPHAAVNGLFLAPAPRSGECLCLTDCVPLFHSHLALSVMLEVALNQVDVWGAQAGLVVAGYYHANAAVNDQSPGPLALKIAGRIAEFFPDAVLIMLDNQKLVPQPRVPPVIVLENQGLRWVPKDKNLVMWRDWEESRQMVGALLEDRAHQHLVDFDCHLDDIRQDWTNQRLNTQITQWVGPTNGNGNA

SEQ ID NO: 207 - protein, 281 aa, Homo sapiens
QVYISSLALLKMLKHGRAGVPMEVMGLMLGEFVDDYTVRVIDVFAMPQSGTGVSVEAVDPVFQAKMLDMLKQTGRPEMVVGWYHSHPGFGCWLSGVDINTQQSFEALSERAVAVVVDPIQSVKGKVVIDAFRLINANMMVLGHEPRQTTSNLGHLNKPSIQALIHGLNRHYYSITINYRKNELEQKMLLNLHKKSWMEGLTLQDYSEHCKHNESVVKEMLELAKNYNKAVEEEDKMTPEQLAIKNVGKQDPKRHLEEHVDVLMTSNIVQCLAAMLDTVVFK

SEQ ID NO: 208 - protein, 253 aa, Homo sapiens
QVKVASEALLIMDLHAHVSMAEVIGLLGGRYSEVDKVVEVCAAEPCNSLSTGLQCEMDPVSQTQASETLAVRGFSVIGWYHSHPAFDPNPSLRDIDTQAKYQSYFSRGGAKFIGMIVSPYNRNNPLPYSQITCLVISEEISPDGSYRLPYKFEVQQMLEEPQWGLVFEKTRWIIEKYRLSHSSVPMDKIFRRDSDLTCLQKLLECMRKTLSKVTNCFMAEEFLTEIENLFLSNYKSNQENGVTEENCTKELLM

SEQ ID NO: 209 - protein, 404 aa, Homo sapiens
AVCFHSANSNADHEGFLLGEVRQEETFSISDSQISNTEFLQVIEIHNHQPCSKLFSFYDYASKVNEESLDRILKDRRKKVIGWYRFRRNTQQQMSYREQVLHKQLTRILGVPDLVFLLFSFISTANNSTHALEYVLFRPNRRYNQRISLAIPNLGNTSQQEYKVSSVPNTSQSYAKVIKEHGTDFFDKDGVMKDIRAIYQVYNALQEKVQAVCADVEKSERVVESCQAEVNKLRRQITQRKNEKEQERRLQQAVLSRQMPSESLDPAFSPRMPSSGFAAEGRSTLGDAEASDPPPPYSDFHPNNQESTLSHSRMERSVFMPRPQAVGSSNYASTSAGLKYPGSGADLPPPQRAAGDSGEDSDDSDYENLIDPTEPSNSEYSHSKDSRPMAHPDEDPRNTQTSQI

SEQ ID NO: 210 - protein, 526 aa, Homo sapiens
FNPRTGQLFLKIIHTSVWAGQKRLGQLAKWKTAEEVAALIRSLPVEEQPKQIIVTRKGMLDPLEVHLLDFPNIVIKGSELQLPFQACLKVEKFGDLILKATEPQMVLFNLYDDWLKTISSYTAFSRLILILRALHVNNDRAKVILKPDKTTITEPHHIWPTLTDEEWIKVEVQLKDLILADYGKKNNVNVASLTQSEIRDIILGMEISAPSQQRQQIAEIEKQTKEQSQLTATQTRTVNKHGDEIITSTTSNYETQTFSSKTEWRVRAISAANLHLRTNHIYVSSDDIKETGYTYILPKNVLKKFICISDLRAQIAGYLYGVSPPDNPQVKEIRCIVMVPQWGTHQTVHLPGQLPQHEYLKEMEPLGWIHTQPNESPQLSPQDVTTHAKIMADNPSWDGEKTIIITCSFTPGSCTLTAYKLTPSGYEWGRQNTDKGNNPKGYLPSHYERVQMLLSDRFLGFFMVPAQSSWNYNFMGVRHDPNMKYELQLANPKEFYHEVHRPSHFLNFALLQEGEVYSADREDLYA

SEQ ID NO: 211 - protein, 400 aa, Homo sapiens
QPSAITLNRQKYRHVDNIMFENHTVADRFLDFWRKTGNQHFGYLYGRYTEHKDIPLGIRAEVAAIYEPPQIGTQNSLELLEDPKAEVVDEIAAKLGLRKVGWIFTDLVSEDTRKGTVRYSRNKDTYFLSSEECITAGDFQNKHPNMCRLSPDGHFGSKFVTAVATGGPDNQVHFEGYQVSNQCMALVRDECLLPCKDAPELGYAKESSSEQYVPDVFYKDVDKFGNEITQLARPLPVEYLIIDITTTFPKDPVYTFSISQNPFPIENRDVLGETQDFHSLATYLSQNTSSVFLDTISDFHLLLFLVTNEVMPLQDSISLLLEAVRTRNEELAQTWKRSEQWATIEQLCSTVGGQLPGLHEYGAVGGSTHTATAAMWACQHCTFMNQPGTGHCEMCSLPRT

SEQ ID NO: 212 - protein, 203 aa, Homo sapiens
TQAYCKMVLHGAKYPHCAVNGLLVAEKQKPRKEHLPLGGPGAHHTLFVDCIPLFHGTLALAPMLEVALTLIDSWCKDHSYVIAGYYQANERVKDASPNQVAEKVASRIAEGFSDTALIMVDNTKFTMDCVAPTIHVYEHHENRWRCRDPHHDYCEDWPEAQRISASLLDSRSYETLVDFDNHLDDIRNDWTNPEINKAVLHLC

SEQ ID NO: 213 - protein, 398 aa, Homo sapiens
GFVLGALAFQHLNTDSDTEGFLLGEVKGEAKNSITDSQMDDVEVVYTIDIQKYIPCYQLFSFYNSSGEVNEQALKKILSNVKKNVVGWYKFRRHSDQIMTFRERLLHKNLQEHFSNQDLVFLLLTPSIITESCSTHRLEHSLYKPQKGLFHRVPLVVANLGMSEQLGYKTVSGSCMSTGFSRAVQTHSSKFFEEDGSLKEVHKINEMYASLQEELKSICKKVEDSEQAVDKLVKDVNRLKREIEKRRGAQIQAAREKNIQKDPQENIFLCQALRTFFPNSEFLHSCVMSLKNRHVSKSSCNYNHHLDVVDNLTLMVEHTDIPEASPASTPQIIKHKALDLDDRWQFKRSRLLDTQDKRSKADTGSSNQDKASKMSSPETDEEIEKMKGFGEYSRSPTF

SEQ ID NO: 214 - protein, 168 aa, Homo sapiens
VVLPEDLCHKFLQLAESNTVRGIETCGILCGKLTHNEFTITHVIVPKQSAGPDYCDMENVEELFNVQDQHDLLTLGWIHTHPTQTAFLSSVDLHTHCSYQLMLPEAIAIVCSPKHKDTGIFRLTNAGMLEVSACKKKGFHPHTKEPRLFSICKHVLVKDIKIIVLDLR

SEQ ID NO: 215 - protein, 287 aa, Homo sapiens
VALHPLVILNISDHWIRMRSQEGRPVQVIGALIGKQEGRNIEVMNSFELLSHTVEEKIIIDKEYYYTKEEQFKQVFKELEFLGWYTTGGPPDPSDIHVHKQVCEIIESPLFLKLNPMTKHTDLPVSVFESVIDIINGEATMLFAELTYTLATEEAERIGVDHVARMTATGSGENSTVAEHLIAQHSAIKMLHSRVKLILEYVKASEAGEVPFNHEILREAYALCHCLPVLSTDKFKTDFYDQCNDVGLMAYLGTITKTCNTMNQFVNKFNVLYDRQGIGRRMRGLFF

SEQ ID NO: 216 - protein, 266 aa, Homo sapiens
VRLHPVILASIVDSYERRNEGAARVIGTLLGTVDKHSVEVTNCFSVPHNESEDEVAVDMEFAKNMYELHKKVSPNELILGWYATGHDITEHSVLIHEYYSREAPNPIHLTVDTSLQNGRMSIKAYVSTLMGVPGRTMGVMFTPLTVKYAYYDTERIGVDLIMKTCFSPNRVIGLSSDLQQVGGASARIQDALSTVLQYAEDVLSGKVSADNTVGRFLMSLVNQVPKIVPDDFETMLNSNINDLLMVTYLANLTQSQIALNEKLVNL

SEQ ID NO: 217 - protein, 316 aa, Homo sapiens
VVVHPLVLLSVVDHFNRIGKVGNQKRVVGVLLGSWQKKVLDVSNSFAVPFDEDDKDDSVWFLDHDYLENMYGMFKKVNARERIVGWYHTGPKLHKNDIAINELMKRYCPNSVLVIIDVKPKDLGLPTEAYISVEEVHDDGTPTSKTFEHVTSEIGAEEAEEVGVEHLLRDIKDTTVGTLSQRITNQVHGLKGLNSKLLDIRSYLEKVATGKLPINHQIIYQLQDVFNLLPDVSLQEFVKAFYLKTNDQMVVVYLASLIRSVVALHNLINNKIANRDAEKKEGQEKEESKKDRKEDKEKDKDKEKSDVKKEEKKEKK

SEQ ID NO: 218 - protein, 314 aa, Homo sapiens
VQIDGLVVLKIIKHYQEEGQGTEVVQGVLLGLVVEDRLEITNCFPFPQHTEDDADFDEVQYQMEMMRSLRHVNIDHLHVGWYQSTYYGSFVTRALLDSQFSYQHAIEESVVLIYDPIKTAQGSLSLKAYRLTPKLMEVCKEKDFSPEALKKANITFEYMFEEVPIVIKNSHLINVLMWELEKKSAVADKHELLSLASSNHLGKNLQLLMDRVDEMSQDIVKYNTYMRNTSKQQQQKHQYQQRRQQENMQRQSRGEPPLPEEDLSKLFKPPQPPARMDSLLIAGQINTYCQNIKEFTAQNLGKLFMAQALQEYNN

SEQ ID NO: 219 - protein, 281 aa, Homo sapiens
YCKISALALLKMVMHARSGGNLEVMGLMLGKVDGETMIIMDSFALPVEGTETRVNAQAAAYEYMAAYIENAKQVGRLENAIGWYHSHPGYGCWLSGIDVSTQMLNQQFQEPFVAVVIDPTRTISAGKVNLGAFRTYPKGYKPPDEGPSEYQTIPLNKIEDFGVHCKQYYALEVSYFKSSLDRKLLELLWNKYWVNTLSSSSLLTNADYTTGQVFDLSEKLEQSEAQLGRGSFMLGLETHDRKSEDKLAKATRDSCKTTIEAIHGLMSQVIKDKLFNQINIS

SEQ ID NO: 220 - protein, 305 aa, Homo sapiens
VHLESDAFLVCLNHALSTEKEEVMGLCIGELNDDTRSDSKFAYTGTEMRTVAEKVDAVRIVHIHSVIILRRSDKRKDRVEISPEQLSAASTEAERLAELTGRPMRVVGWYHSHPHITVWPSHVDVRTQAMYQMMDQGFVGLIFSCFIEDKNTKTGRVLYTCFQSIQAQKSSESLHGPRDFWSSSQHISIEGQKEEERYERIEIPIHIVPHVTIGKVCLESAVELPKILCQEEQDAYRRIHSLTHLDSVTKIHNGSVFTKNLCSQMSAVSGPLLQWLEDRLEQNQQHLQELQQEKEELMQELSSLE

SEQ ID NO: 221 - protein, 492 aa, Homo sapiens
MEPSSKKLTGRLMLAVGGAVLGSLQFGYNTGVINAPQKVIEEFYNQTWVHRYGESILPTTLTTLWSLSVAIFSVGGMIGSFSVGLFVNRFGRRNSMLMMNLLAFVSAVLMGFSKLGKSFEMLILGRFIIGVYCGLTTGFVPMYVGEVSPTALRGALGTLHQLGIVVGILIAQVFGLDSIMGNKDLWPLLLSIIFIPALLQCIVLPFCPESPRFLLINRNEENRAKSVLKKLRGTADVTHDLQEMKEESRQMMREKKVTILELFRSPAYRQPILIAVVLQLSQQLSGINAVFYYSTSIFEKAGVQQPVYATIGSGIVNTAFTVVSLFVVERAGRRTLHLIGLAGMAGCAILMTIALALLEQLPWMSYLSIVAIFGFVAFFEVGPGPIPWFIVAELFSQGPRPAAIAVAGFSNWTSNFIVGMCFQYVEQLCGPYVFIIFTVLLVLFFIFTYFKVPETKGRTFDEIASGFRQGGASQSDKTPEELFHPLGADSQV

SEQ ID NO: 222 - protein, 340 aa, Homo sapiens
MAASSSEISEMKGVEESPKVPGEGPGHSEAETGPPQVLAGVPDQPEAPQPGPNTTAAPVDSGPKAGLAPETTETPAGASETAQATDLSLSPGGESKANCSPEDPCQETVSKPEVSKEATADQGSRLESAAPPEPAPEPAPQPDPRPDSQPTPKPALQPELPTQEDPTPEILSESVGEKQENGAVVPLQAGDGEEGPAPEPHSPPSKKSPPANGAPPRVLQQLVEEDRMRRAHSGHPGSPRGSLSRHPSSQLAGPGVEGGEGTQKPRDYIILAILSCFCPMWPVNIVAFAYAVMSRNSLQQGDVDGAQRLGRVAKLLSIVALVGGVLIIIASCVINLGVYK

SEQ ID NO: 223 - protein, 5202 aa, Homo sapiens
MNCPVLSLGSGFLFQVIEMLIFAYFASISLTESRGLFPRLENVGAFKKVSIVPTQAVCGLPDRSTFCHSSAAAESIQFCTQRFCIQDCPYRSSHPTYTALFSAGLSSCITPDKNDLHPNAHSNSASFIFGNHKSCFSSPPSPKLMASFTLAVWLKPEQQGVMCVIEKTVDGQIVFKLTISEKETMFYYRTVNGLQPPIKVMTLGRILVKKWIHLSVQVHQTKISFFINGVEKDHTPFNARTLSGSITDFASGTVQIGQSLNGLEQFVGRMQDFRLYQVALTNREILEVFSGDLLRLHAQSHCRCPGSHPRVHPLAQRYCIPNDAGDTADNRVSRLNPEAHPLSFVNDNDVGTSWVSNVFTNITQLNQGVTISVDLENGQYQVFYIIIQFFSPQPTEIRIQRKKENSLDWEDWQYFARNCGAFGMKNNGDLEKPDSVNCLQLSNFTPYSRGNVTFSILTPGPNYRPGYNNFYNTPSLQEFVKATQIRFHFHGQYYTTETAVNLRHRYYAVDEITISGRCQCHGHADNCDTTSQPYRCLCSQESFTEGLHCDRCLPLYNDKPFRQGDQVYAFNCKPCQCNSHSKSCHYNISVDPFPFEHFRGGGGVCDDCEHNTTGRNCELCKDYFFRQVGADPSAIDVCKPCDCDTVGTRNGSILCDQIGGQCNCKRHVSGRQCNQCQNGFYNLQELDPDGCSPCNCNTSGTVDGDITCHQNSGQCKCKANVIGLRCDHCNFGFKFLRSFNDVGCEPCQCNLHGSVNKFCNPHSGQCECKKEAKGLQCDTCRENFYGLDVTNCKACDCDTAGSLPGTVCNAKTGQCICKPNVEGRQCNKCLEGNFYLRQNNSFLCLPCNCDKTGTINGSLLCNKSTGQCPCKLGVTGLRCNQCEPHRYNLTIDNFQHCQMCECDSLGTLPGTICDPISGQCLCVPNRQGRRCNQCQPGFYISPGNATGCLPCSCHTTGAVNHICNSLTGQCVCQDASIAGQRCDQCKDHYFGFDPQTGRCQPCNCHLSGALNETCHLVTGQCFCKQFVTGSKCDACVPSASHLDVNNLLGCSKTPFQQPPPRGQVQSSSAINLSWSPPDSPNAHWLTYSLLRDGFEIYTTEDQYPYSIQYFLDTDLLPYTKYSYYIETTNVHGSTRSVAVTYKTKPGVPEGNLTLSYIIPIGSDSVTLTWTTLSNQSGPIEKYILSCAPLAGGQPCVSYEGHETSATIWNLVPFAKYDFSVQACTSGGCLHSLPITVTTAQAPPQRLSPPKMQKISSTELHVEWSPPAELNGIIIRYELYMRRLRSTKETTSEESRVFQSSGWLSPHSFVESANENALKPPQTMTTITGLEPYTKYEFRVLAVNMAGSVSSAWVSERTGESAPVFMIPPSVFPLSSYSLNISWEKPADNVTRGKVVGYDINMLSEQSPQQSIPMAFSQLLHTAKSQELSYTVEGLKPYRIYEFTITLCNSVGCVTSASGAGQTLAAAPAQLRPPLVKGINSTTIHLRWFPPEELNGPSPIYQLERRESSLPALMTTMMKGIRFIGNGYCKFPSSTHPVNTDFTGIKASFRTKVPEGLIVFAASPGNQEEYFALQLKKGRLYFLFDPQGSPVEVTTTNDHGKQYSDGKWHEIIAIRHQAFGQITLDGIYTGSSAILNGSTVIGDNTGVFLGGLPRSYTILRKDPEIIQKGFVGCLKDVHFMKNYNPSAIWEPLDWQSSEEQINVYNSWEGCPASLNEGAQFLGAGFLELHPYMFHGGMNFEISFKFRTDQLNGLLLFVYNKDGPDFLAMELKSGILTFRLNTSLAFTQVDLLLGLSYCNGKWNKVIIKKEGSFISASVNGLMKHASESGDQPLVVNSPVYVGGIPQELLNSYQHLCLEQGFGGCMKDVKFTRGAVVNLASVSSGAVRVNLDGCLSTDSAVNCRGNDSILVYQGKEQSVYEGGLQPFTEYLYRVIASHEGGSVYSDWSRGRTTGAAPQSVPTPSRVRSLNGYSIEVTWDEPVVRGVIEKYILKAYSEDSTRPPRMPSASAEFVNTSNLTGILTGLLPFKNYAVTLTACTLAGCTESSHALNISTPQEAPQEVQPPVAKSLPSSLLLSWNPPKKANGIITQYCLYMDGRLIYSGSEENYIVTDLAVFTPHQFLLSACTHVGCTNSSWVLLYTAQLPPEHVDSPVLTVLDSRTIHIQWKQPRKISGILERYVLYMSNHTHDFTIWSVIYNSTELFQDHMLQYVLPGNKYLIKLGACTGGGCTVSEASEALTDEDIPEGVPAPKAHSYSPDSFNVSWTEPEYPNGVITSYGLYLDGILIHNSSELSYRAYGFAPWSLHSFRVQACTAKGCALGPLVENRTLEAPPEGTVNVFVKTQGSRKAHVRWEAPFRPNGLLTHSVLFTGIFYVDPVGNNYTLLNVTKVMYSGEETNLWVLIDGLVPFTNYTVQVNISNSQGSLITDPITIAMPPGAPDGVLPPRLSSATPTSLQVVWSTPARNNAPGSPRYQLQMRSGDSTHGFLELFSNPSASLSYEVSDLQPYTEYMFRLVASNGFGSAHSSWIPFMTAEDKPGPVVPPILLDVKSRMMLVTWQHPRKSNGVITHYNIYLHGRLYLRTPGNVTNCTVMHLHPYTAYKFQVEACTSKGCSLSPESQTVWTLPGAPEGIPSPELFSDTPTSVIISWQPPTHPNGLVENFTIERRVKGKEEVTTLVTLPRSHSMRFIDKTSALSPWTKYEYRVLMSTLHGGTNSSAWVEVTTRPSRPAGVQPPVVTVLEPDAVQVTWKPPLIQNGDILSYEIHMPDPHITLTNVTSAVLSQKVTHLIPFTNYSVTIVACSGGNGYLGGCTESLPTYVTTHPTVPQNVGPLSVIPLSESYVVISWQPPSKPNGPNLRYELLRRKIQQPLASNPPEDLNRWHNIYSGTQWLYEDKGLSRFTTYEYMLFVHNSVGFTPSREVTVTTLAGLPERGANLTASVLNHTAIDVRWAKPTVQDLQGEVEYYTLFWSSATSNDSLKILPDVNSHVIGHLKPNTEYWIFISVFNGVHSINSAGLHATTCDGEPQGMLPPEVVIINSTAVRVIWTSPSNPNGVVTEYSIYVNNKLYKTGMNVPGSFILRDLSPFTIYDIQVEVCTIYACVKSNGTQITTVEDTPSDIPTPTIRGITSRSLQIDWVSPRKPNGIILGYDLLWKTWYPCAKTQKLVQDQSDELCKAVRCQKPESICGHICYSSEAKVCCNGVLYNPKPGHRCCEEKYIPFVLNSTGVCCGGRIQEAQPNHQCCSGYYARILPGEVCCPDEQHNRVSVGIGDSCCGRMPYSTSGNQICCAGRLHDGHGQKCCGRQIVSNDLECCGGEEGVVYNRLPGMFCCGQDYVNMSDTICCSASSGESKAHIKKNDPVPVKCCETELIPKSQKCCNGVGYNPLKYVCSDKISTGMMMKETKECRILCPASMEATEHCGRCDFNFTSHICTVIRGSHNSTGKASIEEMCSSAEETIHTGSVNTYSYTDVNLKPYMTYEYRISAWNSYGRGLSKAVRARTKEDVPQGVSPPTWTKIDNLEDTIVLNWRKPIQSNGPIIYYILLRNGIERFRGTSLSFSDKEGIQPFQEYSYQLKACTVAGCATSSKVVAATTQGVPESILPPSITALSAVALHLSWSVPEKSNGVIKEYQIRQVGKGLIHTDTTDRRQHTVTGLQPYTNYSFTLTACTSAGCTSSEPFLGQTLQAAPEGVWVTPRHIIINSTTVELYWSLPEKPNGLVSQYQLSRNGNLLFLGGSEEQNFTDKNLEPNSRYTYKLEVKTGGGSSASDDYIVQTPMSTPEEIYPPYNITVIGPYSIFVAWIPPGILIPEIPVEYNVLLNDGSVTPLAFSVGHHQSTLLENLTPFTQYEIRIQACQNGSCGVSSRMFVKTPEAAPMDLNSPVLKALGSACIEIKWMPPEKPNGIIINYFIYRRPAGIEEESVLFVWSEGALEFMDEGDTLRPFTLYEYRVRACNSKGSVESLWSLTQTLEAPPQDFPAPWAQATSAHSVLLNWTKPESPNGIISHYRVVYQERPDDPTFNSPTVHAFTVKGTSHQAHLYGLEPFTTYRIGVVAANHAGEILSPWTLIQTLESSPSGLRNFIVEQKENGRALLLQWSEPMRTNGVIKTYNIFSDGFLEYSGLNRQFLFRRLDPFTLYTLTLEACTRAGCAHSAPQPLWTDEAPPDSQLAPTVHSVKSTSVELSWSEPVNPNGKIIRYEVIRRCFEGKAWGNQTIQADEKIVFTEYNTERNTFMYNDTGLQPWTQCEYKIYTWNSAGHTCSSWNVVRTLQAPPEGLSPPVISYVSMNPQKLLISWIPPEQSNGIIQSYRLQRNEMLYPFSFDPVTFNYTDEELLPFSTYSYALQACTSGGCSTSKPTSITTLEAAPSEVSPPDLWAVSATQMNVCWSPPTVQNGKITKYLVRYDNKESLAGQGLCLLVSHLQPYSQYNFSLVACTNGGCTASVSKSAWTMEALPENMDSPTLQVTGSESIEITWKPPRNPNGQIRSYELRRDGTIVYTGLETRYRDFTLTPGVEYSYTVTASNSQGGILSPLVKDRTSPSAPSGMEPPKLQARGPQEILVNWDPPVRTNGDIINYTLFIRELFERETKIIHINTTHNSFGMQSYIVNQLKPFHRYEIRIQACTTLGCASSDWTFIQTPEIAPLMQPPPHLEVQMAPGGFQPTVSLLWTGPLQPNGKVLYYELYRRQIATQPRKSNPVLIYNGSSTSFIDSELLPFTEYEYQVWAVNSAGKAPSSWTWCRTGPAPPEGLRAPTFHVISSTQAVVNISAPGKPNGIVSLYRLFSSSAHGAETVLSEGMATQQTLHGLQAFTNYSIGVEACTCFNCCSKGPTAELRTHPAPPSGLSSPQIGTLASRTASFRWSPPMFPNGVIHSYELQFHVACPPDSALPCTPSQIETKYTGLGQKASLGGLQPYTTYKLRVVAHNEVGSTASEWISFTTQKELPQYRAPFSVDSNLSVVCVNWSDTFLLNGQLKEYVLTDGGRRVYSGLDTTLYIPRTADKTFFFQVICTTDEGSVKTPLIQYDTSTGLGLVLTTPGKKKGSRSKSTEFYSELWFIVLMAMLGLILLAIFLSLILQRKIHKEPYIRERPPLVPLQKRMSPLNVYPPGENHMGLADTKIPRSGTPVSIRSNRSACVLRIPSQNQTSLTYSQGSLHRSVSQLMDIQDKKVLMDNSLWEAIMGHNSGLYVDEEDLMNAIKDFSSVTKERTTFTDTHL

SEQ ID NO: 224 - protein, 1148 aa, Homo sapiens
MESLLLPVLLLLAILWTQAAALINLKYSVEEEQRAGTVIANVAKDAREAGFALDPRQASAFRVVSNSAPHLVDINPSSGLLVTKQKIDRDLLCRQSPKCIISLEVMSSSMEICVIKVEIKDLNDNAPSFPAAQIELEISEAASPGTRIPLDSAYDPDSGSFGVQTYELTPNELFGLEIKTRGDGSRFAELVVEKSLDRETQSHYSFRITALDGGDPPRLGTVGLSIKVTDSNDNNPVFSESTYAVSVPENSPPNTPVIRLNASDPDEGTNGQVVYSFYGYVNDRTRELFQIDPHSGLVTVTGALDYEEGHVYELDVQAKDLGPNSIPAHCKVTVSVLDTNDNPPVINLLSVNSELVEVSESAPPGYVIALVRVSDRDSGLNGRVQCRLLGNVPFRLQEYESFSTILVDGRLDREQHDQYNLTIQARDGGVPMLQSAKSFTVLITDENDNHPHFSKPYYQVIVQENNTPGAYLLSVSARDPDLGLNGSVSYQIVPSQVRDMPVFTYVSINPNSGDIYALRSFNHEQTKAFEFKVLAKDGGLPSLQSNATVRVIILDVNDNTPVITAPPLINGTAEVYIPRNSGIGYLVTVVKAEDYDEGENGRVTYDMTEGDRGFFEIDQVNGEVRTTRTFGESSKSSYELIVVAHDHGKTSLSASALVLIYLSPALDAQESMGSVNLSLIFIIALGSIAGILFVTMIFVAIKCKRDNKEIRTYNCSNCLTITCLLGCFIKGQNSKCLHCISVSPISEEQDKKTEEKVSLRGKRIAEYSYGHQKKSSKKKKISKNDIRLVPRDVEETDKMNVVSCSSLTSSLNYFDYHQQTLPLGCRRSESTFLNVENQNTRNTSANHIYHHSFNSQGPQQPDLIINGVPLPETENYSFDSNYVNSRAHLIKSSSTFKDLEGNSLKDSGHEESDQTDSEHDVQRSLYCDTAVNDVLNTSVTSMGSQMPDHDQNEGFHCREECRILGHSDRCWMPRNPMPIRSKSPEHVRNIIALSIEATAADVEAYDDCGPTKRTFATFGKDVSDHPAEERPTLKGKRTVDVTICSPKVNSVIREAGNGCEAISPVTSPLHLKSSLPTKPSVSYTIALAPPARDLEQYVNNVNNGPTRPSEAEPRGADSEKVMHEVSPILKEGRNKESPGVKRLKDIVL

SEQ ID NO: 225 - protein, 1807 aa, Homo sapiens
MAKPTSKDSGLKEKFKILLGLGTPRPNPRSAEGKQTEFIITAEILRELSMECGLNNRIRMIGQICEVAKTKKFEEHAVEALWKAVADLLQPERPLEARHAVLALLKAIVQGQGERLGVLRALFFKVIKDYPSNEDLHERLEVFKALTDNGRHITYLEEELADFVLQWMDVGLSSEFLLVLVNLVKFNSCYLDEYIARMVQMICLLCVRTASSVDIEVSLQVLDAVVCYNCLPAESLPLFIVTLCRTINVKELCEPCWKLMRNLLGTHLGHSAIYNMCHLMEDRAYMEDAPLLRGAVFFVGMALWGAHRLYSLRNSPTSVLPSFYQAMACPNEVVSYEIVLSITRLIKKYRKELQVVAWDILLNIIERLLQQLQTLDSPELRTIVHDLLTTVEELCDQNEFHGSQERYFELVERCADQRPESSLLNLISYRAQSIHPAKDGWIQNLQALMERFFRSESRGAVRIKVLDVLSFVLLINRQFYEEELINSVVISQLSHIPEDKDHQVRKLATQLLVDLAEGCHTHHFNSLLDIIEKVMARSLSPPPELEERDVAAYSASLEDVKTAVLGLLVILQTKLYTLPASHATRVYEMLVSHIQLHYKHSYTLPIASSIRLQAFDFLLLLRADSLHRLGLPNKDGVVRFSPYCVCDYMEPERGSEKKTSGPLSPPTGPPGPAPAGPAVRLGSVPYSLLFRVLLQCLKQESDWKVLKLVLGRLPESLRYKVLIFTSPCSVDQLCSALCSMLSGPKTLERLRGAPEGFSRTDLHLAVVPVLTALISYHNYLDKTKQREMVYCLEQGLIHRCASQCVVALSICSVEMPDIIIKALPVLVVKLTHISATASMAVPLLEFLSTLARLPHLYRNFAAEQYASVFAISLPYTNPSKFNQYIVCLAHHVIAMWFIRCRLPFRKDFVPFITKGLRSNVLLSFDDTPEKDSFRARSTSLNERPKSLRIARPPKQGLNNSPPVKEFKESSAAEAFRCRSISVSEHVVRSRIQTSLTSASLGSADENSVAQADDSLKNLHLELTETCLDMMARYVFSNFTAVPKRSPVGEFLLAGGRTKTWLVGNKLVTVTTSVGTGTRSLLGLDSGELQSGPESSSSPGVHVRQTKEAPAKLESQAGQQVSRGARDRVRSMSGGHGLRVGALDVPASQFLGSATSPGPRTAPAAKPEKASAGTRVPVQEKTNLAAYVPLLTQGWAEILVRRPTGNTSWLMSLENPLSPFSSDINNMPLQELSNALMAAERFKEHRDTALYKSLSVPAASTAKPPPLPRSNTVASFSSLYQSSCQGQLHRSVSWADSAVVMEEGSPGEVPVLVEPPGLEDVEAALGMDRRTDAYSRSSSVSSQEEKSLHAEELVGRGIPIERVVSSEGGRPSVDLSFQPSQPLSKSSSSPELQTLQDILGDPGDKADVGRLSPEVKARSQSGTLDGESAAWSASGEDSRGQPEGPLPSSSPRSPSGLRPRGYTISDSAPSRRGKRVERDALKSRATASNAEKVPGINPSFVFLQLYHSPFFGDESNKPILLPNESQSFERSVQLLDQIPSYDTHKIAVLYVGEGQSNSELAILSNEHGSYRYTEFLTGLGRLIELKDCQPDKVYLGGLDVCGEDGQFTYCWHDDIMQAVFHIATLMPTKDVDKHRCDKKRHLGNDFVSIVYNDSGEDFKLGTIKGQFNFVHVIVTPLDYECNLVSLQCRKDMEGLVDTSVAKIVSDRNLPFVARQMALHANMASQVHHSRSNPTDIYPSKWIARLRHIKRLRQRICEEAAYSNPSLPLVHPPSHSKAPAQTPAEPTPGYEVGQRKRLISSVEDFTEFV

SEQ ID NO: 226 - protein, 1164 aa, Homo sapiens
MAQQANVGELLAMLDSPMLGVRDDVTAVFKENLNSDRGPMLVNTLVDYYLETSSQPALHILTTLQEPHDKHLLDRINEYVGKAATRLSILSLLGHVIRLQPSWKHKLSQAPLLPSLLKCLKMDTDVVVLTTGVLVLITMLPMIPQSGKQHLLDFFDIFGRLSSWCLKKPGHVAEVYLVHLHASVYALFHRLYGMYPCNFVSFLRSHYSMKENLETFEEVVKPMMEHVRIHPELVTGSKDHELDPRRWKRLETHDVVIECAKISLDPTEASYEDGYSVSHQISARFPHRSADVTTSPYADTQNSYGCATSTPYSTSRLMLLNMPGQLPQTLSSPSTRLITEPPQATLWSPSMVCGMTTPPTSPGNVPPDLSHPYSKVFGTTAGGKGTPLGTPATSPPPAPLCHSDDYVHISLPQATVTPPRKEERMDSARPCLHRQHHLLNDRGSEEPPGSKGSVTLSDLPGFLGDLASEEDSIEKDKEEAAISRELSEITTAEAEPVVPRGGFDSPFYRDSLPGSQRKTHSAASSSQGASVNPEPLHSSLDKLGPDTPKQAFTPIDLPCGSADESPAGDRECQTSLETSIFTPSPCKIPPPTRVGFGSGQPPPYDHLFEVALPKTAHHFVIRKTEELLKKAKGNTEEDGVPSTSPMEVLDRLIQQGADAHSKELNKLPLPSKSVDWTHFGGSPPSDEIRTLRDQLLLLHNQLLYERFKRQQHALRNRRLLRKVIKAAALEEHNAAMKDQLKLQEKDIQMWKVSLQKEQARYNQLQEQRDTMVTKLHSQIRQLQHDREEFYNQSQELQTKLEDCRNMIAELRIELKKANNKVCHTELLLSQVSQKLSNSESVQQQMEFLNRQLLVLGEVNELYLEQLQNKHSDTTKEVEMMKAAYRKELEKNRSHVLQQTQRLDTSQKRILELESHLAKKDHLLLEQKKYLEDVKLQARGQLQAAESRYEAQKRITQVFELEILDLYGRLEKDGLLKKLEEEKAEAAEAAEERLDCCNDGCSDSMVGHNEEASGHNGETKTPRPSSARGSSGSRGGGGSSSSSSELSTPEKPPHQRAGPFSSRWETTMGEASASIPTTVGSLPSSKSFLGMKARELFRNKSESQCDEDGMTSSLSESLKTELGKDLGVEAKIPLNLDGPHPSPPTPDSVGQLHIMDYNETHHEHS

SEQ ID NO: 227 - protein, 3685 aa, Homo sapiens
MLWWEEVEDCYEREDVQKKTFTKWVNAQFSKFGKQHIENLFSDLQDGRRLLDLLEGLTGQKLPKEKGSTRVHALNNVNKALRVLQNNNVDLVNIGSTDIVDGNHKLTLGLIWNIILHWQVKNVMKNIMAGLQQTNSEKILLSWVRQSTRNYPQVNVINFTTSWSDGLALNALIHSHRPDLFDWNSVVCQQSATQRLEHAFNIARYQLGIEKLLDPEDVDTTYPDKKSILMYITSLFQVLPQQVSIEAIQEVEMLPRPPKVTKEEHFQLHHQMHYSQQITVSLAQGYERTSSPKPRFKSYAYTQAAYVTTSDPTRSPFPSQHLEAPEDKSFGSSLMESEVNLDRYQTALEEVLSWLLSAEDTLQAQGEISNDVEVVKDQFHTHEGYMMDLTAHQGRVGNILQLGSKLIGTGKLSEDEETEVQEQMNLLNSRWECLRVASMEKQSNLHRVLMDLQNQKLKELNDWLTKTEERTRKMEEEPLGPDLEDLKRQVQQHKVLQEDLEQEQVRVNSLTHMVVVVDESSGDHATAALEEQLKVLGDRWANICRWTEDRWVLLQDILLKWQRLTEEQCLFSAWLSEKEDAVNKIHTTGFKDQNEMLSSLQKLAVLKADLEKKKQSMGKLYSLKQDLLSTLKNKSVTQKTEAWLDNFARCWDNLVQKLEKSTAQISQAVTTTQPSLTQTTVMETVTTVTTREQILVKHAQEELPPPPPQKKRQITVDSEIRKRLDVDITELHSWITRSEAVLQSPEFAIFRKEGNFSDLKEKVNAIEREKAEKFRKLQDASRSAQALVEQMVNEGVNADSIKQASEQLNSRWIEFCQLLSERLNWLEYQNNIIAFYNQLQQLEQMTTTAENWLKIQPTTPSEPTAIKSQLKICKDEVNRLSDLQPQIERLKIQSIALKEKGQGPMFLDADFVAFTNHFKQVFSDVQAREKELQTIFDTLPPMRYQETMSAIRTWVQQSETKLSIPQLSVTDYEIMEQRLGELQALQSSLQEQQSGLYYLSTTVKEMSKKAPSEISRKYQSEFEEIEGRWKKLSSQLVEHCQKLEEQMNKLRKIQNHIQTLKKWMAEVDVFLKEEWPALGDSEILKKQLKQCRLLVSDIQTIQPSLNSVNEGGQKIKNEAEPEFASRLETELKELNTQWDHMCQQVYARKEALKGGLEKTVSLQKDLSEMHEWMTQAEEEYLERDFEYKTPDELQKAVEEMKRAKEEAQQKEAKVKLLTESVNSVIAQAPPVAQEALKKELETLTTNYQWLCTRLNGKCKTLEEVWACWHELLSYLEKANKWLNEVEFKLKTTENIPGGAEEISEVLDSLENLMRHSEDNPNQIRILAQTLTDGGVMDELINEELETFNSRWRELHEEAVRRQKLLEQSIQSAQETEKSLHLIQESLTFIDKQLAAYIADKVDAAQMPQEAQKIQSDLTSHEISLEEMKKHNQGKEAAQRVLSQIDVAQKKLQDVSMKFRLFQKPANFEQRLQESKMILDEVKMHLPALETKSVEQEVVQSQLNHCVNLYKSLSEVKSEVEMVIKTGRQIVQKKQTENPKELDERVTALKLHYNELGAKVTERKQQLEKCLKLSRKMRKEMNVLTEWLAATDMELTKRSAVEGMPSNLDSEVAWGKATQKEIEKQKVHLKSITEVGEALKTVLGKKETLVEDKLSLLNSNWIAVTSRAEEWLNLLLEYQKHMETFDQNVDHITKWIIQADTLLDESEKKKPQQKEDVLKRLKAELNDIRPKVDSTRDQAANLMANRGDHCRKLVEPQISELNHRFAAISHRIKTGKASIPLKELEQFNSDIQKLLEPLEAEIQQGVNLKEEDFNKDMNEDNEGTVKELLQRGDNLQQRITDERKREEIKIKQQLLQTKHNALKDLRSQRRKKALEISHQWYQYKRQADDLLKCLDDIEKKLASLPEPRDERKIKEIDRELQKKKEELNAVRRQAEGLSEDGAAMAVEPTQIQLSKRWREIESKFAQFRRLNFAQIHTVREETMMVMTEDMPLEISYVPSTYLTEITHVSQALLEVEQLLNAPDLCAKDFEDLFKQEESLKNIKDSLQQSSGRIDIIHSKKTAALQSATPVERVKLQEALSQLDFQWEKVNKMYKDRQGRFDRSVEKWRRFHYDIKIFNQWLTEAEQFLRKTQIPENWEHAKYKWYLKELQDGIGQRQTVVRTLNATGEEIIQQSSKTDASILQEKLGSLNLRWQEVCKQLSDRKKRLEEQKNILSEFQRDLNEFVLWLEEADNIASIPLEPGKEQQLKEKLEQVKLLVEELPLRQGILKQLNETGGPVLVSAPISPEEQDKLENKLKQTNLQWIKVSRALPEKQGEIEAQIKDLGQLEKKLEDLEEQLNHLLLWLSPIRNQLEIYNQPNQEGPFDVKETEIAVQAKQPDVEEILSKGQHLYKEKPATQPVKRKLEDLSSEWKAVNRLLQELRAKQPDLAPGLTTIGASPTQTVTLVTQPVVTKETAISKLEMPSSLMLEVPALADFNRAWTELTDWLSLLDQVIKSQRVMVGDLEDINEMIIKQKATMQDLEQRRPQLEELITAAQNLKNKTSNQEARTIITDRIERIQNQWDEVQEHLQNRRQQLNEMLKDSTQWLEAKEEAEQVLGQARAKLESWKEGPYTVDAIQKKITETKQLAKDLRQWQTNVDVANDLALKLLRDYSADDTRKVHMITENINASWRSIHKRVSEREAALEETHRLLQQFPLDLEKFLAWLTEAETTANVLQDATRKERLLEDSKGVKELMKQWQDLQGEIEAHTDVYHNLDENSQKILRSLEGSDDAVLLQRRLDNMNFKWSELRKKSLNIRSHLEASSDQWKRLHLSLQELLVWLQLKDDELSRQAPIGGDFPAVQKQNDVHRAFKRELKTKEPVIMSTLETVRIFLTEQPLEGLEKLYQEPRELPPEERAQNVTRLLRKQAEEVNTEWEKLNLHSADWQRKIDETLERLQELQEATDELDLKLRQAEVIKGSWQPVGDLLIDSLQDHLEKVKALRGEIAPLKENVSHVNDLARQLTTLGIQLSPYNLSTLEDLNTRWKLLQVAVEDRVRQLHEAHRDFGPASQHFLSTSVQGPWERAISPNKVPYYINHETQTTCWDHPKMTELYQSLADLNNVRFSAYRTAMKLRRLQKALCLDLLSLSAACDALDQHNLKQNDQPMDILQIINCLTTIYDRLEQEHNNLVNVPLCVDMCLNWLLNVYDTGRTGRIRVLSFKTGIISLCKAHLEDKYRYLFKQVASSTGFCDQRRLGLLLHDSIQIPRQLGEVASFGGSNIEPSVRSCFQFANNKPEIEAALFLDWMRLEPQSMVWLPVLHRVAAAETAKHQAKCNICKECPIIGFRYRSLKHFNYDICQSCFFSGRVAKGHKMHYPMVEYCTPTTSGEDVRDFAKVLKNKFRTKRYFAKHPRMGYLPVQTVLEGDNMETPVTLINFWPVDSAPASSPQLSHDDTHSRIEHYASRLAEMENSNGSYLNDSISPNESIDDEHLLIQHYCQSLNQDSPLSQPRSPAQILISLESEERGELERILADLEEENRNLQAEYDRLKQQHEHKGLSPLPSPPEMMPTSPQSPRDAELIAEAKLLRQHKGRLEARMQILEDHNKQLESQLHRLRQLLEQPQAEAKVNGTTVSSPSTSLQRSDSSQPMLLRVVGSQTSDSMGEEDLLSPPQDTSTGLEEVMEQLNNSFPSSRGRNTPGKPMREDTM

SEQ ID NO: 228 - protein, 1484 aa, Homo sapiens [sequence omitted]

SEQ ID NO: 229 - protein, 1480 aa, Homo sapiens
MQRSPLEKASVVSKLFFSWTRPILRKGYRQRLELSDIYQIPSVDSADNLSEKLEREWDRELASKKNPKLINALRRCFFWRFMFYGIFLYLGEVTKAVQPLLLGRIIASYDPDNKEERSIAIYLGIGLCLLFIVRTLLLHPAIFGLHHIGMQMRIAMFSLIYKKTLKLSSRVLDKISIGQLVSLLSNNLNKFDEGLALAHFVWIAPLQVALLMGLIWELLQASAFCGLGFLIVLALFQAGLGRMMMKYRDQRAGKISERLVITSEMIENIQSVKAYCWEEAMEKMIENLRQTELKLTRKAAYVRYFNSSAFFFSGFFVVFLSVLPYALIKGIILRKIFTTISFCIVLRMAVTRQFPWAVQTWYDSLGAINKIQDFLQKQEYKTLEYNLTTTEVVMENVTAFWEEGFGELFEKAKQNNNNRKTSNGDDSLFFSNFSLLGTPVLKDINFKIERGQLLAVAGSTGAGKTSLLMVIMGELEPSEGKIKHSGRISFCSQFSWIMPGTIKENIIFGVSYDEYRYRSVIKACQLEEDISKFAEKDNIVLGEGGITLSGGQRARISLARAVYKDADLYLLDSPFGYLDVLTEKEIFESCVCKLMANKTRILVTSKMEHLKKADKILILHEGSSYFYGTFSELQNLQPDFSSKLMGCDSFDQFSAERRNSILTETLHRFSLEGDAPVSWTETKKQSFKQTGEFGEKRKNSILNPINSIRKFSIVQKTPLQMNGIEEDSDEPLERRLSLVPDSEQGEAILPRISVISTGPTLQARRRQSVLNLMTHSVNQGQNIHRKTTASTRKVSLAPQANLTELDIYSRRLSQETGLEISEEINEEDLKECFFDDMESIPAVTTWNTYLRYITVHKSLIFVLIWCLVIFLAEVAASLVVLWLLGNTPLQDKGNSTHSRNNSYAVIITSTSSYYVFYIYVGVADTLLAMGFFRGLPLVHTLITVSKILHHKMLHSVLQAPMSTLNTLKAGGILNRFSKDIAILDDLLPLTIFDFIQLLLIVIGAIAVVAVLQPYIFVATVPVIVAFIMLRAYFLQTSQQLKQLESEGRSPIFTHLVTSLKGLWTLRAFGRQPYFETLFHKALNLHTANWFLYLSTLRWFQMRIEMIFVIFFIAVTFISILTTGEGEGRVGIILTLAMNIMSTLQWAVNSSIDVDSLMRSVSRVFKFIDMPTEGKPTKSTKPYKNGQLSKVMIIENSHVKKDDIWPSGGQMTVKDLTAKYTEGGNAILENISFSISPGQRVGLLGRTGSGKSTLLSAFLRLLNTEGEIQIDGVSWDSITLQQWRKAFGVIPQKVFIFSGTFRKNLDPYEQWSDQEIWKVADEVGLRSVIEQFPGKLDFVLVDGGCVLSHGHKQLMCLARSVLSKAKILLLDEPSAHLDPVTYQIIRRTLKQAFADCTVILCEHRIEAMLECQQFLVIEENKVRQYDSIQKLLNERSLFRQAISPSDRVKLFPHRNSSKCKSKPQIAALKEETEEEVQDTRL

SEQ ID NO: 230 - protein, 2009 aa, Homo sapiens
MEQTVLVPPGPDSFNFFTRESLAAIERRIAEEKAKNPKPDKKDDDENGPKPNSDLEAGKNLPFIYGDIPPEMVSEPLEDLDPYYINKKTFIVLNKGKAIFRFSATSALYILTPFNPLRKIAIKILVHSLFSMLIMCTILTNCVFMTMSNPPDWTKNVEYTFTGIYTFESLIKIIARGFCLEDFTFLRDPWNWLDFTVITFAYVTEFVDLGNVSALRTFRVLRALKTISVIPGLKTIVGALIQSVKKLSDVMILTVFCLSVFALIGLQLFMGNLRNKCIQWPPTNASLEEHSIEKNITVNYNGTLINETVFEFDWKSYIQDSRYHYFLEGFLDALLCGNSSDAGQCPEGYMCVKAGRNPNYGYTSFDTFSWAFLSLFRLMTQDFWENLYQLTLRAAGKTYMIFFVLVIFLGSFYLINLILAVVAMAYEEQNQATLEEAEQKEAEFQQMIEQLKKQQEAAQQAATATASEHSREPSAAGRLSDSSSEASKLSSKSAKERRNRRKKRKQKEQSGGEEKDEDEFQKSESEDSIRRKGFRFSIEGNRLTYEKRYSSPHQSLLSIRGSLFSPRRNSRTSLFSFRGRAKDVGSENDFADDEHSTFEDNESRRDSLFVPRRHGERRNSNLSQTSRSSRMLAVFPANGKMHSTVDCNGVVSLVGGPSVPTSPVGQLLPEVIIDKPATDDNGTTTETEMRKRRSSSFHVSMDFLEDPSQRQRAMSIASILTNTVEELEESRQKCPPCWYKFSNIFLIWDCSPYWLKVKHVVNLVVMDPFVDLAITICIVLNTLFMAMEHYPMTDHFNNVLTVGNLVFTGIFTAEMFLKIIAMDPYYYFQEGWNIFDGFIVTLSLVELGLANVEGLSVLRSFRLLRVFKLAKSWPTLNMLIKIIGNSVGALGNLTLVLAIIVFIFAVVGMQLFGKSYKDCVCKIASDCQLPRWHMNDFFHSFLIVFRVLCGEWIETMWDCMEVAGQAMCLTVFMMVMVIGNLVVLNLFLALLLSSFSADNLAATDDDNEMNNLQIAVDRMHKGVAYVKRKIYEFIQQSFIRKQKILDEIKPLDDLNNKKDSCMSNHTAEIGKDLDYLKDVNGTTSGIGTGSSVEKYIIDESDYMSFINNPSLTVTVPIAVGESDFENLNTEDFSSESDLEESKEKLNESSSSSEGSTVDIGAPVEEQPVVEPEETLEPEACFTEGCVQRFKCCQINVEEGRGKQWWNLRRTCFRIVEHNWFETFIVFMILLSSGALAFEDIYIDQRKTIKTMLEYADKVFTYIFILEMLLKWVAYGYQTYFTNAWCWLDFLIVDVSLVSLTANALGYSELGAIKSLRTLRALRPLRALSRFEGMRVVVNALLGAIPSIMNVLLVCLIFWLIFSIMGVNLFAGKFYHCINTTTGDRFDIEDVNNHTDCLKLIERNETARWKNVKVNFDNVGFGYLSLLQVATFKGWMDIMYAAVDSRNVELQPKYEESLYMYLYFVIFIIFGSFFTLNLFIGVIIDNFNQQKKKFGGQDIFMTEEQKKYYNAMKKLGSKKPQKPIPRPGNKFQGMVFDFVTRQVFDISIMILICLNMVTMMVETDDQSEYVTTILSRINLVFIVLFTGECVLKLISLRHYYFTIGWNIFDFVVVILSIVGMFLAELIEKYFVSPTLFRVIRLARIGRILRLIKGAKGIRTLLFALMMSLPALFNIGLLLFLVMFIYAIFGMSNFAYVKREVGIDDMFNFETFGNSMICLFQITTSAGWDGLLAPILNSKPPDCDPNKVNPGSSVKGDCGNPSVGIFFFVSYIIISFLVVVNMYIAVILENFSVATEESAEPLSEDDFEMFYEVWEKFDPDATQFMEFEKLSQFAAALEPPLNLPQPNKLQLIAMDLPMVSGDRIHCLDILFAFTKRVLGESGEMDALRIQMEERFMASNPSKVSYQPITTTLKRKQEEVSAVIIQRAYRRHLLKRTVKQASFTYNKNKIKGGANLLIKEDMIIDRINENSITEKTDLTMSTAACPPSYDRVTKPIVEKHEQEGKDEKAKGK

SEQ ID NO: 231 - protein, 1465 aa, Homo sapiens
MPEQERQITAREGASRKILSKLSLPTRAWEPAMKKSFAFDNVGYEGGLDGLGPSSQVATSTVRILGMTCQSCVKSIEDRISNLKGIISMKVSLEQGSATVKYVPSVVCLQQVCHQIGDMGFEASIAEGKAASWPSRSLPAQEAVVKLRVEGMTCQSCVSSIEGKVRKLQGVVRVKVSLSNQEAVITYQPYLIQPEDLRDHVNDMGFEAAIKSKVAPLSLGPIDIERLQSTNPKRPLSSANQNFNNSETLGHQGSHVVTLQLRIDGMHCKSCVLNIEENIGQLLGVQSIQVSLENKTAQVKYDPSCTSPVALQRAIEALPPGNFKVSLPDGAEGSGTDHRSSSSHSPGSPPRNQVQGTCSTTLIAIAGMTCASCVHSIEGMISQLEGVQQISVSLAEGTATVLYNPSVISPEELRAAIEDMGFEASVVSESCSTNPLGNHSAGNSMVQTTDGTPTSVQEVAPHTGRLPANHAPDILAKSPQSTRAVAPQKCFLQIKGMTCASCVSNIERNLQKEAGVLSVLVALMAGKAEIKYDPEVIQPLEIAQFIQDLGFEAAVMEDYAGSDGNIELTITGMTCASCVHNIESKLTRTNGITYASVALATSKALVKFDPEIIGPRDIIKIIEEIGFHASLAQRNPNAHHLDHKMEIKQWKKSFLCSLVFGIPVMALMIYMLIPSNEPHQSMVLDHNIIPGLSILNLIFFILCTFVQLLGGWYFYVQAYKSLRHRSANMDVLIVLATSIAYVYSLVILVVAVAEKAERSPVTFFDTPPMLFVFIALGRWLEHLAKSKTSEALAKLMSLQATEATVVTLGEDNLIIREEQVPMELVQRGDIVKVVPGGKFPVDGKVLEGNTMADESLITGEAMPVTKKPGSTVIAGSINAHGSVLIKATHVGNDTTLAQIVKLVEEAQMSKAPIQQLADRFSGYFVPFIIIMSTLTLVVWIVIGFIDFGVVQRYFPNPNKHISQTEVIIRFAFQTSITVLCIACPCSLGLATPTAVMVGTGVAAQNGILIKGGKPLEMAHKIKTVMFDKTGTITHGVPRVMRVLLLGDVATLPLRKVLAVVGTAEASSEHPLGVAVTKYCKEELGTETLGYCTDFQAVPGCGIGCKVSNVEGILAHSERPLSAPASHLNEAGSLPAEKDAVPQTFSVLIGNREWLRRNGLTISSDVSDAMTDHEMKGQTAILVAIDGVLCGMIAIADAVKQEAALAVHTLQSMGVDVVLITGDNRKTARAIATQVGINKVFAEVLPSHKVAKVQELQNKGKKVAMVGDGVNDSPALAQADMGVAIGTGTDVAIEAADVVLIRNDLLDVVASIHLSKRTVRRIRINLVLALIYNLVGIPIAAGVFMPIGIVLQPWMGSAAMAASSVSVVLSSLQLKCYKKPDLERYEAQAHGHMKPLTASQVSVHIGMDDRWRDSPRATPWDQVSYVSQVSLSSLTSDKPSRHSAAADDDGDKWSLLLNGRDEEQYI

SEQ ID NO: 232 - protein, 872 aa, Homo sapiens [sequence omitted]

SEQ ID NO: 233 - protein, 2005 aa, Homo sapiens
MAQSVLVPPGPDSFRFFTRESLAAIEQRIAEEKAKRPKQERKDEDDENGPKPNSDLEAGKSLPFIYGDIPPEMVSVPLEDLDPYYINKKTFIVLNKGKAISRFSATPALYILTPFNPIRKLAIKILVHSLFNMLIMCTILTNCVFMTMSNPPDWTKNVEYTFTGIYTFESLIKILARGFCLEDFTFLRDPWNWLDFTVITFAYVTEFVDLGNVSALRTFRVLRALKTISVIPGLKTIVGALIQSVKKLSDVMILTVFCLSVFALIGLQLFMGNLRNKCLQWPPDNSSFEINITSFFNNSLDGNGTTFNRTVSIFNWDEYIEDKSHFYFLEGQNDALLCGNSSDAGQCPEGYICVKAGRNPNYGYTSFDTFSWAFLSLFRLMTQDFWENLYQLTLRAAGKTYMIFFVLVIFLGSFYLINLILAVVAMAYEEQNQATLEEAEQKEAEFQQMLEQLKKQQEEAQAAAAAASAESRDFSGAGGIGVFSESSSVASKLSSKSEKELKNRRKKKKQKEQSGEEEKNDRVRKSESEDSIRRKGFRFSLEGSRLTYEKRFSSPHQSLLSIRGSLFSPRRNSRASLFSFRGRAKDIGSENDFADDEHSTFEDNDSRRDSLFVPHRHGERRHSNVSQASRASRVLPILPMNGKMHSAVDCNGVVSLVGGPSTLTSAGQLLPEGTTTETEIRKRRSSSYHVSMDLLEDPTSRQRAMSIASILTNTMEELEESRQKCPPCWYKFANMCLIWDCCKPWLKVKHLVNLVVMDPFVDLAITICIVLNTLFMAMEHYPMTEQFSSVLSVGNLVFTGIFTAEMFLKIIAMDPYYYFQEGWNIFDGFIVSLSLMELGLANVEGLSVLRSFRLLRVFKLAKSWPTLNMLIKIIGNSVGALGNLTLVLAIIVFIFAVVGMQLFGKSYKECVCKISNDCELPRWHMHDFFHSFLIVFRVLCGEWIETMWDCMEVAGQTMCLTVFMMVMVIGNLVVLNLFLALLLSSFSSDNLAATDDDNEMNNLQIAVGRMQKGIDFVKRKIREFIQKAFVRKQKALDEIKPLEDLNNKKDSCISNHTTIEIGKDLNYLKDGNGTTSGIGSSVEKYVVDESDYMSFINNPSLTVTVPIAVGESDFENLNTEEFSSESDMEESKEKLNATSSSEGSTVDIGAPAEGEQPEVEPEESLEPEACFTEDCVRKFKCCQISIEEGKGKLWWNLRKTCYKIVEHNWFETFIVFMILLSSGALAFEDIYIEQRKTIKTMLEYADKVFTYIFILEMLLKWVAYGFQVYFTNAWCWLDFLIVDVSLVSLTANALGYSELGAIKSLRTLRALRPLRALSRFEGMRVVVNALLGAIPSIMNVLLVCLIFWLIFSIMGVNLFAGKFYHCINYTTGEMFDVSVVNNYSECKALIESNQTARWKNVKVNFDNVGLGYLSLLQVATFKGWMDIMYAAVDSRNVELQPKYEDNLYMYLYFVIFIIFGSFFTLNLFIGVIIDNFNQQKKKFGGQDIFMTEEQKKYYNAMKKLGSKKPQKPIPRPANKFQGMVFDFVTKQVFDISIMILICLNMVTMMVETDDQSQEMTNILYWINLVFIVLFTGECVLKLISLRYYYFTIGWNIFDFVVVILSIVGMFLAELIEKYFVSPTLFRVIRLARIGRILRLIKGAKGIRTLLFALMMSLPALFNIGLLLFLVMFIYAIFGMSNFAYVKREVGIDDMFNFETFGNSMICLFQITTSAGWDGLLAPILNSGPPDCDPDKDHPGSSVKGDCGNPSVGIFFFVSYIIISFLVVVNMYIAVILENFSVATEESAEPLSEDDFEMFYEVWEKFDPDATQFIEFAKLSDFADALDPPLLIAKPNKVQLIAMDLPMVSGDRIHCLDILFAFTKRVLGESGEMDALRIQMEERFMASNPSKVSYEPITTTLKRKQEEVSAIIIQRAYRRYLLKQKVKKVSSIYKKDKGKECDGTPIKEDTLIDKLNENSTPEKTDMTPSTTSPPSYDSVTKPEKEKFEKDKSEKEDKGKDIRESKK

SEQ ID NO: 234 - protein, 2506 aa, Homo sapiens
MARFGDEMPARYGGGGSGAAAGVVVGSGGGRGAGGSRQGGQPGAQRMYKQSMAQRARTMALYNPIPVRQNCLTVNRSLFLFSEDNVVRKYAKKITEWPPFEYMILATIIANCIVLALEQHLPDDDKTPMSERLDDTEPYFIGIFCFEAGIKIIALGFAFHKGSYLRNGWNVMDFVVVLTGILATVGTEFDLRTLRAVRVLRPLKLVSGIPSLQVVLKSIMKAMIPLLQIGLLLFFAILIFAIIGLEFYMGKFHTTCFEEGTDDIQGESPAPCGTEEPARTCPNGTKCQPYWEGPNNGITQFDNILFAVLTVFQCITMEGWTDLLYNSNDASGNTWNWLYFIPLIIIGSFFMLNLVLGVLSGEFAKERERVENRRAFLKLRRQQQIERELNGYMEWISKAEEVILAEDETDGEQRHPFDALRRTTIKKSKTDLLNPEEAEDQLADIASVGSPFARASIKSAKLENSTFFHKKERRMRFYIRRMVKTQAFYWTVLSLVALNTLCVAIVHYNQPEWLSDFLYYAEFIFLGLFMSEMFIKMYGLGTRPYFHSSFNCFDCGVIIGSIFEVIWAVIKPGTSFGISVLRALRLLRIFKVTKYWASLRNLVVSLLNSMKSIISLLFLLFLFIVVFALLGMQLFGGQFNFDEGTPPTNFDTFPAAIMTVFQILTGEDWNEVMYDGIKSQGGVQGGMVFSIYFIVLTLFGNYTLLNVFLAIAVDNLANAQELTKDEQEEEEAANQKLALQKAKEVAEVSPLSAANMSIAVKEQQKNQKPAKSVWEQRTSEMRKQNLLASREALYNEMDPDERWKAAYTRHLRPDMKTHLDRPLVVDPQENRNNNTNKSRAAEPTVDQRLGQQRAEDFLRKQARYHDRARDPSGSAGLDARRPWAGSQEAELSREGPYGRESDHHAREGSLEQPGFWEGEAERGKAGDPHRRHVHRQGGSRESRSGSPRTGADGEHRRHRAHRRPGEEGPEDKAERRARHREGSRPARGGEGEGEGPDGGERRRRHRHGAPATYEGDARREDKERRHRRRKENQGSGVPVSGPNLSTTRPIQQDLGRQDPPLAEDIDNMKNNKLATAESAAPHGSLGHAGLPQSPAKMGNSTDPGPMLAIPAMATNPQNAASRRTPNNPGNPSNPGPPKTPENSLIVTNPSGTQTNSAKTARKPDHTTVDIPPACPPPLNHTVVQVNKNANPDPLPKKEEEKKEEEEDDRGEDGPKPMPPYSSMFILSTTNPLRRLCHYILNLRYFEMCILMVIAMSSIALAAEDPVQPNAPRNNVLRYFDYVFTGVFTFEMVIKMIDLGLVLHQGAYFRDLWNILDFIVVSGALVAFAFTGNSKGKDINTIKSLRVLRVLRPLKTIKRLPKLKAVFDCVVNSLKNVFNILIVYMLFMFIFAVVAVQLFKGKFFHCTDESKEFEKDCRGKYLLYEKNEVKARDREWKKYEFHYDNVLWALLTLFTVSTGEGWPQVLKHSVDATFENQGPSPGYRMEMSIFYVVYFVVFPFFFVNIFVALIIITFQEQGDKMMEEYSLEKNERACIDFAISAKPLTRHMPQNKQSFQYRMWQFVVSPPFEYTIMAMIALNTIVLMMKFYGASVAYENALRVFNIVFTSLFSLECVLKVMAFGILNYFRDAWNIFDFVTVLGSITDILVTEFGNNFINLSFLRLFRAARLIKLLRQGYTIRILLWTFVQSFKALPYVCLLIAMLFFIYAIIGMQVFGNIGIDVEDEDSDEDEFQITEHNNFRTFFQALMLLFRSATGEAWHNIMLSCLSGKPCDKNSGILTRECGNEFAYFYFVSFIFLCSFLMLNLFVAVIMDNFEYLTRDSSILGPHHLDEYVRVWAEYDPAAWGRMPYLDMYQMLRHMSPPLGLGKKCPARVAYKRLLRMDLPVADDNTVHFNSTLMALIRTALDIKIAKGGADKQQMDAELRKEMMAIWPNLSQKTLDLLVTPHKSTDLTVGKIYAAMMIMEYYRQSKAKKLQAMREEQDRTPLMFQRMEPPSPTQEGGPGQNALPSTQLDPGGALMAHESGLKESPSWVTQRAQEMFQKTGTWSPEQGPPTDMPNSQPNSQSVEMREMGRDGYSDSEHYLPMEGQGRAASMPRLPAENQRRRGRPRGNNLSTISDTSPMKRSASVLGPKARRLDDYSLERVPPEENQRHHQRRRDRSHRASERSLGRYTDVDTGLGTDLSMTTQSGDLPSKERDQERGRPKDRKHRQHHHHHHHHHHPPPPDKDRYAQERPDHGRARARDQRWSRSPSEGREHMAHRQGSSSVSGSPAPSTSGTSTPRRGRRQLPQTPSTPRPHVSYSPVIRKAGGSGPPQQQQQQQQQQQQQAVARPGRAATSGPRRYPGPTAEPLAGDRPPTGGHSSGRSPRMERRVPGPARSESPRACRHGGARWPASGPHVSEGPPGPRHHGYYRGSDYDEADGPGSGGGEEAMAGAYDAPPPVRHASSGATGRSPRTPRASGPACASPSRHGRRLPNGYYPAHGLARPRGPGSRKGLHEPYSESDDDWC

SEQ ID NO: 235 - protein, 1980 aa, Homo sapiens
MAARLLAPPGPDSFKPFTPESLANIERRIAESKLKKPPKADGSHREDDEDSKPKPNSDLEAGKSLPFIYGDIPQGLVAVPLEDFDPYYLTQKTFVVLNRGKTLFRFSATPALYILSPFNLIRRIAIKILIHSVFSMIIMCTILTNCVFMTFSNPPDWSKNVEYTFTGIYTFESLVKIIARGFCIDGFTFLRDPWNWLDFSVIMMAYITEFVNLGNVSALRTFRVLRALKTISVIPGLKTIVGALIQSVKKLSDVMILTVFCLSVFALIGLQLFMGNLRNKCVVWPINFNESYLENGTKGFDWEEYINNKTNFYTVPGMLEPLLCGNSSDAGQCPEGYQCMKAGRNPNYGYTSFDTFSWAFLALFRLMTQDYWENLYQLTLRAAGKTYMIFFVLVIFVGSFYLVNLILAVVAMAYEEQNQATLEEAEQKEAEFKAMLEQLKKQQEEAQAAAMATSAGTVSEDAIEEEGEEGGGSPRSSSEISKLSSKSAKERRNRRKKRKQKELSEGEEKGDPEKVFKSESEDGMRRKAFRLPDNRIGRKFSIMNQSLLSIPGSPFLSRHNSKSSIFSFRGPGRFRDPGSENEFADDEHSTVEESEGRRDSLFIPIRARERRSSYSGYSGYSQGSRSSRIFPSLRRSVKRNSTVDCNGVVSLIGGPGSHIGGRLLPEATTEVEIKKKGPGSLLVSMDQLASYGRKDRINSIMSVVTNTLVEELEESQRKCPPCWYKFANTFLIWECHPYWIKLKEIVNLIVMDPFVDLAITICIVLNTLFMAMEHHPMTPQFEHVLAVGNLVFTGIFTAEMFLKLIAMDPYYYFQEGWNIFDGFIVSLSLMELSLADVEGLSVLRSFRLLRVFKLAKSWPTLNMLIKIIGNSVGALGNLTLVLAIIVFIFAVVGMQLFGKSYKECVCKINQDCELPRWHMHDFFHSFLIVFRVLCGEWIETMWDCMEVAGQAMCLIVFMMVMVIGNLVVLNLFLALLLSSFSADNLAATDDDGEMNNLQISVIRIKKGVAWTKLKVHAFMQAHFKQREADEVKPLDELYEKKANCIANHTGADIHRNGDFQKNGNGTTSGIGSSVEKYIIDEDHMSFINNPNLTVRVPIAVGESDFENLNTEDVSSESDPEGSKDKLDDTSSSEGSTIDIKPEVEEVPVEQPEEYLDPDACFTEGCVQRFKCCQVNIEEGLGKSWWILRKTCFLIVEHNWFETFIIFMILLSSGALAFEDIYIEQRKTIRTILEYADKVFTYIFILEMLLKWTAYGFVKFFTNAWCWLDFLIVAVSLVSLIANALGYSELGAIKSLRTLRALRPLRALSRFEGMRVVVNALVGAIPSIMNVLLVCLIFWLIFSIMGVNLFAGKYHYCFNETSEIRFEIEDVNNKTECEKLMEGNNTEIRWKNVKINFDNVGAGYLALLQVATFKGWMDIMYAAVDSRKPDEQPKYEDNIYMYIYFVIFIIFGSFFTLNLFIGVIIDNFNQQKKKFGGQDIFMTEEQKKYYNAMKKLGSKKPQKPIPRPLNKIQGIVFDFVTQQAFDIVIMMLICLNMVTMMVETDTQSKQMENILYWINLVFVIFFTCECVLKMFALRHYYFTIGWNIFDFVVVILSIVGMFLADIIEKYFVSPTLFRVIRLARIGRILRLIKGAKGIRTLLFALMMSLPALFNIGLLLFLVMFIFSIFGMSNFAYVKHEAGIDDMFNFETFGNSMICLFQITTSAGWDGLLLPILNRPPDCSLDKEHPGSGFKGDCGNPSVGIFFFVSYIIISFLIVVNMYIAIILENFSVATEESADPLSEDDFETFYEIWEKFDPDATQFIEYCKLADFADALEHPLRVPKPNTIELIAMDLPMVSGDRIHCLDILFAFTKRVLGDSGELDILRQQMEERFVASNPSKVSYEPITTTLRRKQEEVSAVVLQRAYRGHLARRGFICKKTTSNKLENGGTHREKKESTPSTASLPSYDSVTKPEKEKQQRAEEGRRERAKRQKEVRESKC

SEQ ID NO: 236 - protein, 1464 aa, Homo sapiens [sequence omitted]

SEQ ID NO: 237 - protein, 599 aa, Homo sapiens [sequence omitted]

SEQ ID NO: 238 - protein, 1020 aa, Homo sapiens
MGRGAGREYSPAATTAENGGGKKKQKEKELDELKKEVAMDDHKLSLDELGRKYQVDLSKGLTNQRAQDVLARDGPNALTPPPTTPEWVKFCRQLFGGFSILLWIGAILCFLAYGIQAAMEDEPSNDNLYLGVVLAAVVIVTGCFSYYQEAKSSKIMDSFKNMVPQQALVIREGEKMQINAEEVVVGDLVEVKGGDRVPADLRIISSHGCKVDNSSLTGESEPQTRSPEFTHENPLETRNICFFSTNCVEGTARGIVIATGDRTVMGRIATLASGLEVGRTPIAMEIEHFIQLITGVAVFLGVSFFVLSLILGYSWLEAVIFLIGIIVANVPEGLLATVTVCLTLTAKRMARKNCLVKNLEAVETLGSTSTICSDKTGTLTQNRMTVAHMWFDNQIHEADTTEDQSGATFDKRSPTWTALSRIAGLCNRAVFKAGQENISVSKRDTAGDASESALLKCIELSCGSVRKMRDRNPKVAEIPFNSTNKYQLSIHEREDSPQSHVLVMKGAPERILDRCSTILVQGKEIPLDKEMQDAFQNAYMELGGLGERVLGFCQLNLPSGKFPRGFKFDTDELNFPTEKLCFVGLMSMIDPPRAAVPDAVGKCRSAGIKVIMVTGDHPITAKAIAKGVGIISEGNETVEDIAARLNIPMSQVNPREAKACVVHGSDLKDMTSEQLDEILKNHTEIVFARTSPQQKLIIVEGCQRQGAIVAVTGDGVNDSPALKKADIGIAMGISGSDVSKQAADMILLDDNFASIVTGVEEGRLIFDNLKKSIAYTLTSNIPEITPFLLFIIANIPLPLGTVTILCIDLGTDMVPAISLAYEAAESDIMKRQPRNSQTDKLVNERLISMAYGQIGMIQALGGFFTYFVILAENGFLPSRLLGIRLDWDDRTMNDLEDSYGQEWTYEQRKVVEFTCHTAFFASIVVVQWADLIICKTRRNSVFQQGMKNKILIFGLLEETALAAFLSYCPGMGVALRMYPLKVTWWFCAFPYSLLIFIYDEVRKLILRRYPGGWVEKETYY

SEQ ID NO: 239 - protein, 1013 aa, Homo sapiens
MGDKKDDKDSPKKNKGKERRDLDDLKKEVAMTEHKMSVEEVCRKYNTDCVQGLTHSKAQEILARDGPNALTPPPTTPEWVKFCRQLFGGFSILLWIGAILCFLAYGIQAGTEDDPSGDNLYLGIVLAAVVIITGCFSYYQEAKSSKIMESFKNMVPQQALVIREGEKMQVNAEEVVVGDLVEIKGGDRVPADLRIISAHGCKVDNSSLTGESEPQTRSPDCTHDNPLETRNITFFSTNCVEGTARGVVVATGDRTVMGRIATLASGLEVGKTPIAIEIEHFIQLITGVAVFLGVSFFILSLILGYTWLEAVIFLIGIIVANVPEGLLATVTVCLTLTAKRMARKNCLVKNLEAVETLGSTSTICSDKTGTLTQNRMTVAHMWFDNQIHEADTTEDQSGTSFDKSSHTWVALSHIAGLCNRAVFKGGQDNIPVLKRDVAGDASESALLKCIELSSGSVKLMRERNKKVAEIPFNSTNKYQLSIHETEDPNDNRYLLVMKGAPERILDRCSTILLQGKEQPLDEEMKEAFQNAYLELGGLGERVLGFCHYYLPEEQFPKGFAFDCDDVNFTTDNLCFVGLMSMIDPPRAAVPDAVGKCRSAGIKVIMVTGDHPITAKAIAKGVGIISEGNETVEDIAARLNIPVSQVNPRDAKACVIHGTDLKDFTSEQIDEILQNHTEIVFARTSPQQKLIIVEGCQRQGAIVAVTGDGVNDSPALKKADIGVAMGIAGSDVSKQAADMILLDDNFASIVTGVEEGRLIFDNLKKSIAYTLTSNIPEITPFLLFIMANIPLPLGTITILCIDLGTDMVPAISLAYEAAESDIMKRQPRNPRTDKLVNERLISMAYGQIGMIQALGGFFSYFVILAENGFLPGNLVGIRLNWDDRTVNDLEDSYGQQWTYEQRKVVEFTCHTAFFVSIVVVQWADLIICKTRRNSVFQQGMKNKILIFGLFEETALAAFLSYCPGMDVALRMYPLKPSWWFCAFPYSFLIFVYDEIRKLILRRNPGGWVEKETYY

SEQ ID NO: 240 - protein, 1988 aa, Homo sapiens
MAMLPPPGPQSFVHFTKQSLALIEQRIAERKSKEPKEEKKDDDEEAPKPSSDLEAGKQLPFIYGDIPPGMVSEPLEDLDPYYADKKTFIVLNKGKTIFRFNATPALYMLSPFSPLRRISIKILVHSLFSMLIMCTILTNCIFMTMNNPPDWTKNVEYTFTGIYTFESLVKILARGFCVGEFTFLRDPWNWLDFVVIVFAYLTEFVNLGNVSALRTFRVLRALKTISVIPGLKTIVGALIQSVKKLSDVMILTVFCLSVFALIGLQLFMGNLKHKCFRNSLENNETLESIMNTLESEEDFRKYFYYLEGSKDALLCGFSTDSGQCPEGYTCVKIGRNPDYGYTSFDTFSWAFLALFRLMTQDYWENLYQQTLRAAGKTYMIFFVVVIFLGSFYLINLILAVVAMAYEEQNQANIEEAKQKELEFQQMLDRLKKEQEEAEAIAAAAAEYTSIRRSRIMGLSESSSETSKLSSKSAKERRNRRKKKNQKKLSSGEEKGDAEKLSKSESEDSIRRKSFHLGVEGHRRAHEKRLSTPNQSPLSIRGSLFSARRSSRTSLFSFKGRGRDIGSETEFADDEHSIFGDNESRRGSLFVPHRPQERRSSNISQASRSPPMLPVNGKMHSAVDCNGVVSLVDGRSALMLPNGQLLPEVIIDKATSDDSGTTNQIHKKRRCSSYLLSEDMLNDPNLRQRAMSRASILTNTVEELEESRQKCPPWWYRFAHKFLIWNCSPYWIKFKKCIYFIVMDPFVDLAITICIVLNTLFMAMEHHPMTEEFKNVLAIGNLVFTGIFAAEMVLKLIAMDPYEYFQVGWNIFDSLIVTLSLVELFLADVEGLSVLRSFRLLRVFKLAKSWPTLNMLIKIIGNSVGALGNLTLVLAIIVFIFAVVGMQLFGKSYKECVCKINDDCTLPRWHMNDFFHSFLIVFRVLCGEWIETMWDCMEVAGQAMCLIVYMMVMVIGNLVVLNLFLALLLSSFSSDNLTAIEEDPDANNLQIAVTRIKKGINYVKQTLREFILKAFSKKPKISREIRQAEDLNTKKENYISNHTLAEMSKGHNFLKEKDKISGFGSSVDKHLMEDSDGQSFIHNPSLTVTVPIAPGESDLENMNAEELSSDSDSEYSKVRLNRSSSSECSTVDNPLPGEGEEAEAEPMNSDEPEACFTDGCVWRFSCCQVNIESGKGKIWWNIRKTCYKIVEHSWFESFIVLMILLSSGALAFEDIYIERKKTIKIILEYADKIFTYIFILEMLLKWIAYGYKTYFTNAWCWLDFLIVDVSLVTLVANTLGYSDLGPIKSLRTLRALRPLRALSRFEGMRVVVNALIGAIPSIMNVLLVCLIFWLIFSIMGVNLFAGKFYECINTTDGSRFPASQVPNRSECFALMNVSQNVRWKNLKVNFDNVGLGYLSLLQVATFKGWTIIMYAAVDSVNVDKQPKYEYSLYMYIYFVVFIIFGSFFTLNLFIGVIIDNFNQQKKKLGGQDIFMTEEQKKYYNAMKKLGSKKPQKPIPRPGNKIQGCIFDLVTNQAFDISIMVLICLNMVTMMVEKEGQSQHMTEVLYWINVVFIILFTGECVLKLISLRHYYFTVGWNIFDFVVVIISIVGMFLADLIETYFVSPTLFRVIRLARIGRILRLVKGAKGIRTLLFALMMSLPALFNIGLLLFLVMFIYAIFGMSNFAYVKKEDGINDMFNFETFGNSMICLFQITTSAGWDGLLAPILNSKPPDCDPKKVHPGSSVEGDCGNPSVGIFYFVSYIIISFLVVVNMYIAVILENFSVATEESTEPLSEDDFEMFYEVWEKFDPDATQFIEFSKLSDFAAALDPPLLIAKPNKVQLIAMDLPMVSGDRIHCLDILFAFTKRVLGESGEMDSLRSQMEERFMSANPSKVSYEPITTTLKRKQEDVSATVIQRAYRRYRLRQNVKNISSIYIKDGDRDDDLLNKKDMAFDNVNENSSPEKTDATSSTTSPPSYDSVTKPDKEKYEQDRTEKEDKGKDSKESKK

SEQ ID NO: 241 - protein, 473 aa, Homo sapiens [sequence omitted]

SEQ ID NO: 242 - protein, 872 aa, Homo sapiens
MGLKARRAAGAAGGGGDGGGGGGGAANPAGGDAAAAGDEERKVGLAPGDVEQVTLALGAGADKDGTLLLEGGGRDEGQRRTPQGIGLLAKTPLSRPVKRNNAKYRRIQTLIYDALERPRGWALLYHALVFLIVLGCLILAVLTTFKEYETVSGDWLLLLETFAIFIFGAEFALRIWAAGCCCRYKGWRGRLKFARKPLCMLDIFVLIASVPVVAVGNQGNVLATSLRSLRFLQILRMLRMDRRGGTWKLLGSAICAHSKELITAWYIGFLTLILSSFLVYLVEKDVPEVDAQGEEMKEEFETYADALWWGLITLATIGYGDKTPKTWEGRLIAATFSLIGVSFFALPAGILGSGLALKVQEQHRQKHFEKRRKPAAELIQAAWRYYATNPNRIDLVATWRFYESVVSFPFFRKEQLEAASSQKLGLLDRVRLSNPRGSNTKGKLFTPLNVDAIEESPSKEPKPVGLNNKERFRTAFRMKAYAFWQSSEDAGTGDPMAEDRGYGNDFPIEDMIPTLKAAIRAVRILQFRLYKKKFKETLRPYDVKDVIEQYSAGHLDMLSRIKYLQTRIDMIFTPGPPSTPKHKKSQKGSAFTFPSQQSPRNEPYVARPSTSEIEDQSMMGKFVKVERQVQDMGKKLDFLVDMHMQHMERLQVQVTEYYPTKGTSSPAEAEKKEDNRYSDLKTIICNYSETGPPEPPYSFHQVTIDKVSPYGFFAHDPVNLPRGGPSSGKVQATPPSSATTYVERPTVLPILTLLDSRVSCHSQADLQGPYSDRISPRQRRSITRDSDTPLSLMSVNHEELERSPSGFSISQDRDDYVFGPNGGSSWMREKRYLAEGETDTDTDPFTPSGSMPLSSTGDGISDSVWTPSNKPI

SEQ ID NO: 243 - protein, 348 aa, Homo sapiens [sequence omitted]

SEQ ID NO: 244 - protein, 1218 aa, Homo sapiens
MRSPRTRGRSGRPLSLLLALLCALRAKVCGASGQFELEILSMQNVNGELQNGNCCGGARNPGDRKCTRDECDTYFKVCLKEYQSRVTAGGPCSFGSGSTPVIGGNTFNLKASRGNDRNRIVLPFSFAWPRSYTLLVEAWDSSNDTVQPDSIIEKASHSGMINPSRQWQTLKQNTGVAHFEYQIRVTCDDYYYGFGCNKFCRPRDDFFGHYACDQNGNKTCMEGWMGPECNRAICRQGCSPKHGSCKLPGDCRCQYGWQGLYCDKCIPHPGCVHGICNEPWQCLCETNWGGQLCDKDLNYCGTHQPCLNGGTCSNTGPDKYQCSCPEGYSGPNCEIAEHACLSDPCHNRGSCKETSLGFECECSPGWTGPTCSTNIDDCSPNNCSHGGTCQDLVNGFKCVCPPQWTGKTCQLDANECEAKPCVNAKSCKNLIASYYCDCLPGWMGQNCDININDCLGQCQNDASCRDLVNGYRCICPPGYAGDHCERDIDECASNPCLNGGHCQNEINRFQCLCPTGFSGNLCQLDIDYCEPNPCQNGAQCYNRASDYFCKCPEDYEGKNCSHLKDHCRTTPCEVIDSCTVAMASNDTPEGVRYISSNVCGPHGKCKSQSGGKFTCDCNKGFTGTYCHENINDCESNPCRNGGTCIDGVNSYKCICSDGWEGAYCETNINDCSQNPCHNGGTCRDLVNDFYCDCKNGWKGKTCHSRDSQCDEATCNNGGTCYDEGDAFKCMCPGGWEGTTCNIARNSSCLPNPCHNGGTCVVNGESFTCVCKEGWEGPICAQNTNDCSPHPCYNSGTCVDGDNWYRCECAPGFAGPDCRININECQSSPCAFGATCVDEINGYRCVCPPGHSGAKCQEVSGRPCITMGSVIPDGAKWDDDCNTCQCLNGRIACSKVWCGPRPCLLHKGHSECPSGQSCIPILDDQCFVHPCTGVGECRSSSLQPVKTKCTSDSYYQDNCANITFTFNKEMMSPGLTTEHICSELRNLNILKNVSAEYSIYIACEPSPSANNEIHVAISAEDIRDDGNPIKEITDKIIDLVSKRDGNSSLIAAVAEVRVQRRPLKNRTDFLVPLLSSVLTVAWICCLVTAFYWCLRKRRKPGSHTHSASEDNTTNNVREQLNQIKNPIEKHGANTVPIKDYENKNSKMSKIRTHNSEVEEDDMDKHQQKARFAKQPAYTLVDREEKPPNGTPTKHPNWTNKQDNRDLESAQSLNRMEYIV

SEQ ID NO: 245 - protein, 2758 aa, Homo sapiens
MSDKMSSFLHIGDICSLYAEGSTNGFISTLGLVDDRCVVQPETGDLNNPPKKFRDCLFKLCPMNRYSAQKQFWKAAKPGANSTTDAVLLNKLHHAADLEKKQNETENRKLLGTVIQYGNVIQLLHLKSNKYLTVNKRLPALLEKNAMRVTLDEAGNEGSWFYIQPFYKLRSIGDSVVIGDKVVLNPVNAGQPLHASSHQLVDNPGCNEVNSVNCNTSWKIVLFMKWSDNKDDILKGGDVVRLFHAEQEKFLTCDEHRKKQHVFLRTTGRQSATSATSSKALWEVEVVQHDPCRGGAGYWNSLFRFKHLATGHYLAAEVDPDFEEECLEFQPSVDPDQDASRSRLRNAQEKMVYSLVSVPEGNDISSIFELDPTTLRGGDSLVPRNSYVRLRHLCTNTWVHSTNIPIDKEEEKPVMLKIGTSPVKEDKEAFAIVPVSPAEVRDLDFANDASKVLGSIAGKLEKGTITQNERRSVTKLLEDLVYFVTGGTNSGQDVLEVVFSKPNRERQKLMREQNILKQIFKLLQAPFTDCGDGPMLRLEELGDQRHAPFRHICRLCYRVLRHSQQDYRKNQEYIAKQFGFMQKQIGYDVLAEDTITALLHNNRKLLEKHITAAEIDTFVSLVRKNREPRFLDYLSDLCVSMNKSIPVTQELICKAVLNPTNADILIETKLVLSRFEFEGVSSTGENALEAGEDEEEVWLFWRDSNKEIRSKSVRELAQDAKEGQKEDRDVLSYYRYQLNLFARMCLDRQYLAINEISGQLDVDLILRCMSDENLPYDLRASFCRLMLHMHVDRDPQEQVTPVKYARLWSEIPSEIAIDDYDSSGASKDEIKERFAQTMEFVEEYLRDVVCQRFPFSDKEKNKLTFEVVNLARNLIYFGFYNFSDLLRLTKILLAILDCVHVTTIFPISKMAKGEENKGNNDVEKLKSSNVMRSIHGVGELMTQVVLRGGGFLPMTPMAAAPEGNVKQAEPEKEDIMVMDTKLKIIEILQFILNVRLDYRISCLLCIFKREFDESNSQTSETSSGNSSQEGPSNVPGALDFEHIEEQAEGIFGGSEENTPLDLDDHGGRTFLRVLLHLTMHDYPPLVSGALQLLFRHFSQRQEVLQAFKQVQLLVTSQDVDNYKQIKQDLDQLRSIVEKSELWVYKGQGPDETMDGASGENEHKKTEEGNNKPQKHESTSSYNYRVVKEILIRLSKLCVQESASVRKSRKQQQRLLRNMGAHAVVLELLQIPYEKAEDTKMQEIMRLAHEFLQNFCAGNQQNQALLHKHINLFLNPGILEAVTMQHIFMNNFQLCSEINERVVQHFVHCIETHGRNVQYIKFLQTIVKAEGKFIKKCQDMVMAELVNSGEDVLVFYNDRASFQTLIQMMRSERDRMDENSPLMYHIHLVELLAVCTEGKNVYTEIKCNSLLPLDDIVRVVTHEDCIPEVKIAYINFLNHCYVDTEVEMKEIYTSNHMWKLFENFLVDICRACNNTSDRKHADSILEKYVTEIVMSIVTTFFSSPFSDQSTTLQTRQPVFVQLLQGVFRVYHCNWLMPSQKASVESCIRVLSDVAKSRAIAIPVDLDSQVNNLFLKSHSIVQKTAMNWRLSARNAARRDSVLAASRDYRNIIERLQDIVSALEDRLRPLVQAELSVLVDVLHRPELLFPENTDARRKCESGGFICKLIKHTKQLLEENEEKLCIKVLQTLREMMTKDRGYGEKLISIDELDNAELPPAPDSENATEELEPSPPLRQLEDHKRGEALRQVLVNRYYGNVRPSGRRESLTSFGNGPLSAGGPGKPGGGGGGSGSSSMSRGEMSLAEVQCHLDKEGASNLVIDLIMNASSDRVFHESILLAIALLEGGNTTIQHSFFCRLTEDKKSEKFFKVFYDRMKVAQQEIKATVTVNTSDLGNKKKDDEVDRDAPSRKKAKEPTTQITEEVRDQLLEASAATRKAFTTFRREADPDDHYQPGEGTQATADKAKDDLEMSAVITIMQPILRFLQLLCENHNRDLQNFLRCQNNKTNYNLVCETLQFLDCICGSTTGGLGLLGLYINEKNVALINQTLESLTEYCQGPCHENQNCIATHESNGIDIITALILNDINPLGKKRMDLVLELKNNASKLLLAIMESRHDSENAERILYNMRPKELVEVIKKAYMQGEVEFEDGENGEDGAASPRNVGHNIYILAHQLARHNKELQSMLKPGGQVDGDEALEFYAKHTAQIEIVRLDRTMEQIVFPVPSICEFLTKESKLRIYYTTERDEQGSKINDFFLRSEDLFNEMNWQKKLRAQPVLYWCARNMSFWSSISFNLAVLMNLLVAFFYPFKGVRGGTLEPHWSGLLWTAMLISLAIVIALPKPHGIRALIASTILRLIFSVGLQPTLFLLGAFNVCNKIIFLMSFVGNCGTFTRGYRAMVLDVEFLYHLLYLVICAMGLFVHEFFYSLLLFDLVYREETLLNVIKSVTRNGRSIILTAVLALILVYLFSIVGYLFFKDDFILEVDRLPNETAVPETGESLASEFLFSDVCRVESGENCSSPAPREELVPAEETEQDKEHTCETLLMCIVTVLSHGLRSGGGVGDVLRKPSKEEPLFAARVIYDLLFFFMVIIIVLNLIFGVIIDTFADLRSEKQKKEEILKTTCFICGLERDKFDNKTVTFEEHIKEEHNMWHYLCFIVLVKVKDSTEYTGPESYVAEMIKERNLDWFPRMRAMSLVSSDSEGEQNELRNLQEKLESTMKLVTNLSGQLSELKDQMTEQRKQKQRIGLLGHPPHMNVNPQQPA

SEQ ID NO: 246 - protein, 413 aa, Artificial Sequence [sequence omitted]

SEQ ID NO: 247 - protein, 380 aa, Artificial Sequence
  Description of Artificial Sequence: Synthetic polypeptide
MDSPIQIFRGEPGPTCAPSACLPPNSSAWFPGWAEPDSNGSAGSEDAQLEPAHISPAIPVIITAVYSVVFVVGLVGNSLVMFVIIRYTKMKTATNIYIFNLALADALVTTTMPFQSTVYLMNSWPFGDVLCKIVISIDYYNMFTSIFTLTMMSVDRYIAVCHPVKALDFRTPLKAKIINICIWLLSSSVGISAIVLGGTKVREDVDVIECSLQFPDDDYSWWDLFMKICVFIFAFVIPVLIIIVCYTLMILRLKSVRLLSGSREKDRNLRRITRLVLVVVAVFVVCWTPIHIFILVEALGSTSHSTAALSSYYFCIALGYTNSSLNPILYAFLDENFKRCFRDFCFPLKMRMERQSTSRVRNTVQDPAYLRDIDGMNKPV

SEQ ID NO: 248 - protein, 466 aa, Artificial Sequence
  Description of Artificial Sequence: Synthetic polypeptide
MNNSTNSSNNSLALTSPYKTFEVVFIVLVAGSLSLVTIIGNILVMVSIKVNRHLQTVNNYFLFSLACADLIIGVFSMNLYTLYTVIGYWPLGPVVCDLWLALDYVVSNASVMNLLIISFDRYFCVTKPLTYPVKRTTKMAGMMIAAAWVLSFILWAPAILFWQFIVGVRTVEDGECYIQFFSNAAVTFGTAIAAFYLPVIIMTVLYWHISRASKSRIKKDKKEPVANQDPVSPSLVQGRIVKPNNNNMPSSDDGLEHNKIQNGKAPRDPVTENCVQGEEKESSNDSTSVSAVASNMRDDEITQDENTVSTSLGHSKDENSKQTCIRIGTKTPKSDSCTPTNTTVEVVGSSGQNGDEKQNIVARKIVKMTKQPAKKKPPPSREKKVTRTILAILLAFIITWAPYNVMVLINTFCAPCIPNTVWTIGYWLCYINSTINPACYALCNATFKKTFKHLLMCHYKNIGATR

SEQ ID NO: 249 - protein, 238 aa, Artificial Sequence
  Description of Artificial Sequence: Synthetic polypeptide
VSKGEELFTGVVPILVELDGDVNGHKFSVSGEGEGDATYGKLTLKFICTTGKLPVPWPTLVTTFGYGLQCFARYPDHMKQHDFFKSAMPEGYVQERTIFFKDDGNYKTRAEVKFEGDTLVNRIELKGIDFKEDGNILGHKLEYNYNSHNVYIMADKQKNGIKVNFKIRHNIEDGSVQLADHYQQNTPIGDGPVLLPDNHYLSYQSALSKDPNEKRDHMVLLEFVTAAGITLGMDELYK

SEQ ID NO: 250 - protein, 236 aa, Artificial Sequence
  Description of Artificial Sequence: Synthetic polypeptide
MVSKGEEDNMAIIKEFMRFKVHMEGSVNGHEFEIEGEGEGRPYEGTQTAKLKVTKGGPLPFAWDILSPQFMYGSKAYVKHPADIPDYLKLSFPEGFKWERVMNFEDGGVVTVTQDSSLQDGEFIYKVKLRGTNFPSDGPVMQKKTMGWEASSERMYPEDGALKGEIKQRLKLKDGGHYDAEVKTTYKAKKPVQLPGAYNVNIKLDITSHNEDYTIVEQYERAEGRHSTGGMDELYK

SEQ ID NO: 251 - protein, 239 aa, Artificial Sequence
  Description of Artificial Sequence: Synthetic polypeptide
MVSKGEELFTGVVPILVELDGDVNGHKFSVSGEGEGDATYGKLTLKFICTTGKLPVPWPTLVTTLTWGVQCFSRYPDHMKQHDFFKSAMPEGYVQERTIFFKDDGNYKTRAEVKFEGDTLVNRIELKGIDFKEDGNILGHKLEYNYISHNVYITADKQKNGIKANFKIRHNIEDGSVQLADHYQQNTPIGDGPVLLPDNHYLSTQSALSKDPNEKRDHMVLLEFVTAAGITLGMDELYK

SEQ ID NO: 252 - protein, 22 aa, Artificial Sequence
  Description of Artificial Sequence: Synthetic peptide
GSGATNFSLLKQAGDVEENPGP

SEQ ID NO: 253 - protein, 21 aa, Artificial Sequence
  Description of Artificial Sequence: Synthetic peptide
GSGEGRGSLLTCGDVEENPGP

SEQ ID NO: 254 - protein, 23 aa, Artificial Sequence
  Description of Artificial Sequence: Synthetic peptide
GSGQCTNYALLKLAGDVESNPGP

SEQ ID NO: 255 - protein, 115 aa, Artificial Sequence [sequence omitted]

SEQ ID NO: 256 - protein, 120 aa, Artificial Sequence
  Description of Artificial Sequence: Synthetic polypeptide
QVQLQESGGGLVQAGGSLRLSCAASGSIFALNIMGWYRQAPGKQRELVAAIHSGGTTNYANSVKGRFTISRDNAANTVYLQMNSLKPEDTAVYYCNVKDFGAIIYDYDYWGQGTQVTVSS

SEQ ID NO: 257 - protein, 134 aa, Artificial Sequence
  Description of Artificial Sequence: Synthetic polypeptide
MAQVQLVESGGGLVRPGGSLRLSCVDSERTSYPMGWFRRAPGKEREFVASITWSGIDPTYADSVADRFTTSRDVANNTLYLQMNSLKHEDTAVYYCAARAPVGQSSSPYDYDYWGQGTQVTVSSHHHHHHEPEA

SEQ ID NO: 258 - protein, 125 aa, Artificial Sequence
  Description of Artificial Sequence: Synthetic polypeptide
GPGSQVQLQESGGGLVQAGDSLRLSCAASGFDFDNFDDYAIGWFRQAPGQEREGVSCIDPSDGSTIYADSAKGRFTISSDNAENTVYLQMNSLKPEDTAVYVCSAWTLFHSDEYWGQGTQVTVSS

SEQ ID NO: 259 - protein, 394 aa, Artificial Sequence
  Description of Artificial Sequence: Synthetic polypeptide
PPSFSEGSGGSRTPEKGFSDREPTRPPRPILQRQDDIVQEKRLSRGISHASSSIVSLARSHVSSNGGGGGSNEHPLEMPICAFQLPDLTVYNEDFRSFIERDLIEQSMLVALEQAGRLNWWVSVDPTSQRLLPLATTGDGNCLLHAASLGMWGFHDRDLMLRKALYALMEKGVEKEALKRRWRWQQTQQNKESGLVYTEDEWQKEWNELIKLASSEPRMHLGTNGANCGGVESSEEPVYESLEEFHVFVLAHVLRRPIVVVADTMLRDSGGEAFAPIPFGGIYLPLEVPASQCHRSPLVLAYDQAHFSALVSMEQKENTKEQAVIPLTDSEYKLLPLHFAVDPGKGWEWGKDDSDNVRLASVILSLEVKLHLLHSYMNVKWIPLSSDAQAPLAQ

SEQ ID NO: 260 - protein, 195 aa, Artificial Sequence
  Description of Artificial Sequence: Synthetic polypeptide
DEKLALYLAEVEKQDKYLRQRNKYRFHIIPDGNCLYRAVSKTVYGDQSLHRELREQTVHYIADHLDHFSPLIEGDVGEFIIAAAQDGAWAGYPELLAMGQMLNVNIHLTTGGRLESPTVSTMIHYLGPEDSLRPSIWLSWLSNGHYDAVFDHSYPNPEYDNWCKQTQVQRKRDEELAKSMAISLSKMYIEQNACS

SEQ ID NO: 261 - protein, 453 aa, Artificial Sequence
  Description of Artificial Sequence: Synthetic polypeptide
LEVDFKKLKQIKNRMKKTDWLFLNACVGVVEGDLAAIEAYKSSGGDIARQLTADEVRLLNRPSAFDVGYTLVHLAIRFQRQDMLAILLTEVSQQAAKCIPAMVCPELTEQIRREIAASLHQRKGDFACYFLTDLVTFTLPADIEDLPPTVQEKLFDEVLDRDVQKELEEESPIINWSLELATRLDSRLYALWNRTAGDCLLDSVLQATWGIYDKDSVLRKALHDSLHDCSHWFYTRWKDWESWYSQSFGLHFSLREEQWQEDWAFILSLASQPGASLEQTHIFVLAHILRRPIIVYGVKYYKSFRGETLGYTRFQGVYLPLLWEQSFCWKSPIALGYTRGHFSALVAMENDGYGNRGAGANLNTDDDVTITFLPLVDSERKLLHVHFLSAQELGNEEQQEKLLREWLDCCVTEGGVLVAMQKSSRRRNHPLVTQMVEKWLDRYRQIRPCTSLS

SEQ ID NO: 262 - protein, 370 aa, Artificial Sequence
  Description of Artificial Sequence: Synthetic polypeptide
SDDKMAHHTLLLGSGHVGLRNLGNTCFLNAVLQCLSSTRPLRDFCLRRDFRQEVPGGGRAQELTEAFADVIGALWHPDSCEAVNPTRFRAVFQKYVPSFSGYSQQDAQEFLKLLMERLHLEINRRGRRAPPILANGPVPSPPRRGGALLEEPELSDDDRANLMWKRYLEREDSKIVDLFVGQLKSCLKCQACGYRSTTFEVFCDLSLPIPKKGFAGGKVSLRDCFNLFTKEEELESENAPVCDRCRQKTRSTKKLTVQRFPRILVLHLNRFSASRGSIKKSSVGVDFPLQRLSLGDFASDKAGSPVYQLYALCNHSGSVHYGHYTALCRCQTGWHVYNDSRVSPVSENQVASSEGYVLFYQLMQEPPRCL

SEQ ID NO: 263 - protein, 175 aa, Artificial Sequence
  Description of Artificial Sequence: Synthetic polypeptide
ATPMDAYLRKLGLYRKLVAKDGSCLFRAVAEQVLHSQSRHVEVRMACIHYLRENREKFEAFIEGSFEEYLKRLENPQEWVGQVEISALSLMYRKDFIIYREPNVSPSQVTENNFPEKVLLCFSNGNHYDIVYPIKYKESSAMCQSLLYELLYEKVFKTDVSKIVMELDTLEVADE

SEQ ID NO: 264 - protein, 520 aa, Artificial Sequence; identical to SEQ ID NO: 3
  Description of Artificial Sequence: Synthetic polypeptide

SEQ ID NO: 265 - protein, 909 aa, Artificial Sequence
  Description of Artificial Sequence: Synthetic polypeptide
MGQPGNGSAFLLAPNGSHAPDHDVTQERDEVWVVGMGIVMSLIVLAIVFGNVLVITAIAKFERLQTVTNYFITSLACADLVMGLAVVPFGAAHILMKMWTFGNFWCEFWTSIDVLCVTASIETLCVIAVDRYFAITSPFKYQSLLTKNKARVIILMVWIVSGLTSFLPIQMHWYRATHQEAINCYANETCCDFFTNQAYAIASSIVSFYVPLVIMVFVYSRVFQEAKRQLQKIDKSEGRFHVQNLSQVEQDGRTGHGLRRSSKFCLKEHKALKTLGIIMGTFTLCWLPFFIVNIVHVIQDNLIRKEVYILLNWIGYVNSGFNPLIYCRSPDFRIAFQELLCLRRSSLKAYGNGYSSNGNTGEQSGYHVEQEKENKLLCEDLPGTEDFVGHQGTVPSDNIDSQGRNCSTNDSLLVSKGEELFTGVVPILVELDGDVNGHKFSVSGEGEGDATYGKLTLKFICTTGKLPVPWPTLVTTFGYGLQCFARYPDHMKQHDFFKSAMPEGYVQERTIFFKDDGNYKTRAEVKFEGDTLVNRIELKGIDFKEDGNILGHKLEYNYNSHNVYIMADKQKNGIKVNFKIRHNIEDGSVQLADHYQQNTPIGDGPVLLPDNHYLSYQSALSKDPNEKRDHMVLLEFVTAAGITLGMDELYKGSGATNFSLLKQAGDVEENPGPMVSKGEEDNMAIIKEFMRFKVHMEGSVNGHEFEIEGEGEGRPYEGTQTAKLKVTKGGPLPFAWDILSPQFMYGSKAYVKHPADIPDYLKLSFPEGFKWERVMNFEDGGVVTVTQDSSLQDGEFIYKVKLRGTNFPSDGPVMQKKTMGWEASSERMYPEDGALKGEIKQRLKLKDGGHYDAEVKTTYKAKKPVQLPGAYNVNIKLDITSHNEDYTIVEQYERAEGRHSTGGMDELYK

SEQ ID NO: 266 - protein, 876 aa, Artificial Sequence
  Description of Artificial Sequence: Synthetic polypeptide
MDSPIQIFRGEPGPTCAPSACLPPNSSAWFPGWAEPDSNGSAGSEDAQLEPAHISPAIPVIITAVYSVVFVVGLVGNSLVMFVIIRYTKMKTATNIYIFNLALADALVTTTMPFQSTVYLMNSWPFGDVLCKIVISIDYYNMFTSIFTLTMMSVDRYIAVCHPVKALDFRTPLKAKIINICIWLLSSSVGISAIVLGGTKVREDVDVIECSLQFPDDDYSWWDLFMKICVFIFAFVIPVLIIIVCYTLMILRLKSVRLLSGSREKDRNLRRITRLVLVVVAVFVVCWTPIHIFILVEALGSTSHSTAALSSYYFCIALGYTNSSLNPILYAFLDENFKRCFRDFCFPLKMRMERQSTSRVRNTVQDPAYLRDIDGMNKPVVSKGEELFTGVVPILVELDGDVNGHKFSVSGEGEGDATYGKLTLKFICTTGKLPVPWPTLVTTFGYGLQCFARYPDHMKQHDFFKSAMPEGYVQERTIFFKDDGNYKTRAEVKFEGDTLVNRIELKGIDFKEDGNILGHKLEYNYNSHNVYIMADKQKNGIKVNFKIRHNIEDGSVQLADHYQQNTPIGDGPVLLPDNHYLSYQSALSKDPNEKRDHMVLLEFVTAAGITLGMDELYKGSGATNFSLLKQAGDVEENPGPMVSKGEEDNMAIIKEFMRFKVHMEGSVNGHEFEIEGEGEGRPYEGTQTAKLKVTKGGPLPFAWDILSPQFMYGSKAYVKHPADIPDYLKLSFPEGFKWERVMNFEDGGVVTVTQDSSLQDGEFIYKVKLRGTNFPSDGPVMQKKTMGWEASSERMYPEDGALKGEIKQRLKLKDGGHYDAEVKTTYKAKKPVQLPGAYNVNIKLDITSHNEDYTIVEQYERAEGRHSTGGMDELYK

SEQ ID NO: 267 - protein, 962 aa, Artificial Sequence
  Description of Artificial Sequence: Synthetic polypeptide
MNNSTNSSNNSLALTSPYKTFEVVFIVLVAGSLSLVTIIGNILVMVSIKVNRHLQTVNNYFLFSLACADLIIGVFSMNLYTLYTVIGYWPLGPVVCDLWLALDYVVSNASVMNLLIISFDRYFCVTKPLTYPVKRTTKMAGMMIAAAWVLSFILWAPAILFWQFIVGVRTVEDGECYIQFFSNAAVTFGTAIAAFYLPVIIMTVLYWHISRASKSRIKKDKKEPVANQDPVSPSLVQGRIVKPNNNNMPSSDDGLEHNKIQNGKAPRDPVTENCVQGEEKESSNDSTSVSAVASNMRDDEITQDENTVSTSLGHSKDENSKQTCIRIGTKTPKSDSCTPTNTTVEVVGSSGQNGDEKQNIVARKIVKMTKQPAKKKPPPSREKKVTRTILAILLAFIITWAPYNVMVLINTFCAPCIPNTVWTIGYWLCYINSTINPACYALCNATFKKTFKHLLMCHYKNIGATRVSKGEELFTGVVPILVELDGDVNGHKFSVSGEGEGDATYGKLTLKFICTTGKLPVPWPTLVTTFGYGLQCFARYPDHMKQHDFFKSAMPEGYVQERTIFFKDDGNYKTRAEVKFEGDTLVNRIELKGIDFKEDGNILGHKLEYNYNSHNVYIMADKQKNGIKVNFKIRHNIEDGSVQLADHYQQNTPIGDGPVLLPDNHYLSYQSALSKDPNEKRDHMVLLEFVTAAGITLGMDELYKGSGATNFSLLKQAGDVEENPGPMVSKGEEDNMAIIKEFMRFKVHMEGSVNGHEFEIEGEGEGRPYEGTQTAKLKVTKGGPLPFAWDILSPQFMYGSKAYVKHPADIPDYLKLSFPEGFKWERVMNFEDGGVVTVTQDSSLQDGEFIYKVKLRGTNFPSDGPVMQKKTMGWEASSERMYPEDGALKGEIKQRLKLKDGGHYDAEVKTTYKAKKPVQLPGAYNVNIKLDITSHNEDYTIVEQYERAEGRHSTGGMDELYK

SEQ ID NO: 268 - protein, 655 aa, Artificial Sequence
  Description of Artificial Sequence: Synthetic polypeptide
MVSKGEELFTGVVPILVELDGDVNGHKFSVSGEGEGDATYGKLTLKFICTTGKLPVPWPTLVTTLTWGVQCFSRYPDHMKQHDFFKSAMPEGYVQERTIFFKDDGNYKTRAEVKFEGDTLVNRIELKGIDFKEDGNILGHKLEYNYISHNVYITADKQKNGIKANFKIRHNIEDGSVQLADHYQQNTPIGDGPVLLPDNHYLSTQSALSKDPNEKRDHMVLLEFVTAAGITLGMDELYKGSGATNFSLLKQAGDVEENPGPPPSFSEGSGGSRTPEKGFSDREPTRPPRPILQRQDDIVQEKRLSRGISHASSSIVSLARSHVSSNGGGGGSNEHPLEMPICAFQLPDLTVYNEDFRSFIERDLIEQSMLVALEQAGRLNWWVSVDPTSQRLLPLATTGDGNCLLHAASLGMWGFHDRDLMLRKALYALMEKGVEKEALKRRWRWQQTQQNKESGLVYTEDEWQKEWNELIKLASSEPRMHLGTNGANCGGVESSEEPVYESLEEFHVFVLAHVLRRPIVVVADTMLRDSGGEAFAPIPFGGIYLPLEVPASQCHRSPLVLAYDQAHFSALVSMEQKENTKEQAVIPLTDSEYKLLPLHFAVDPGKGWEWGKDDSDNVRLASVILSLEVKLHLLHSYMNVKWIPLSSDAQAPLAQ

SEQ ID NO: 269 - protein, 456 aa, Artificial Sequence
  Description of Artificial Sequence: Synthetic polypeptide
MVSKGEELFTGVVPILVELDGDVNGHKFSVSGEGEGDATYGKLTLKFICTTGKLPVPWPTLVTTLTWGVQCFSRYPDHMKQHDFFKSAMPEGYVQERTIFFKDDGNYKTRAEVKFEGDTLVNRIELKGIDFKEDGNILGHKLEYNYISHNVYITADKQKNGIKANFKIRHNIEDGSVQLADHYQQNTPIGDGPVLLPDNHYLSTQSALSKDPNEKRDHMVLLEFVTAAGITLGMDELYKGSGATNFSLLKQAGDVEENPGPDEKLALYLAEVEKQDKYLRQRNKYRFHIIPDGNCLYRAVSKTVYGDQSLHRELREQTVHYIADHLDHFSPLIEGDVGEFIIAAAQDGAWAGYPELLAMGQMLNVNIHLTTGGRLESPTVSTMIHYLGPEDSLRPSIWLSWLSNGHYDAVFDHSYPNPEYDNWCKQTQVQRKRDEELAKSMAISLSKMYIEQNACS

SEQ ID NO: 270 - protein, 714 aa, Artificial Sequence
  Description of Artificial Sequence: Synthetic polypeptide
MVSKGEELFTGVVPILVELDGDVNGHKFSVSGEGEGDATYGKLTLKFICTTGKLPVPWPTLVTTLTWGVQCFSRYPDHMKQHDFFKSAMPEGYVQERTIFFKDDGNYKTRAEVKFEGDTLVNRIELKGIDFKEDGNILGHKLEYNYISHNVYITADKQKNGIKANFKIRHNIEDGSVQLADHYQQNTPIGDGPVLLPDNHYLSTQSALSKDPNEKRDHMVLLEFVTAAGITLGMDELYKGSGATNFSLLKQAGDVEENPGPLEVDFKKLKQIKNRMKKTDWLFLNACVGVVEGDLAAIEAYKSSGGDIARQLTADEVRLLNRPSAFDVGYTLVHLAIRFQRQDMLAILLTEVSQQAAKCIPAMVCPELTEQIRREIAASLHQRKGDFACYFLTDLVTFTLPADIEDLPPTVQEKLFDEVLDRDVQKELEEESPIINWSLELATRLDSRLYALWNRTAGDCLLDSVLQATWGIYDKDSVLRKALHDSLHDCSHWFYTRWKDWESWYSQSFGLHFSLREEQWQEDWAFILSLASQPGASLEQTHIFVLAHILRRPIIVYGVKYYKSFRGETLGYTRFQGVYLPLLWEQSFCWKSPIALGYTRGHFSALVAMENDGYGNRGAGANLNTDDDVTITFLPLVDSERKLLHVHFLSAQELGNEEQQEKLLREWLDCCVTEGGVLVAMQKSSRRRNHPLVTQMVEKWLDRYRQIRPCTSLS

SEQ ID NO: 271 - protein, 631 aa, Artificial Sequence
  Description of Artificial Sequence: Synthetic polypeptide
MVSKGEELFTGVVPILVELDGDVNGHKFSVSGEGEGDATYGKLTLKFICTTGKLPVPWPTLVTTLTWGVQCFSRYPDHMKQHDFFKSAMPEGYVQERTIFFKDDGNYKTRAEVKFEGDTLVNRIELKGIDFKEDGNILGHKLEYNYISHNVYITADKQKNGIKANFKIRHNIEDGSVQLADHYQQNTPIGDGPVLLPDNHYLSTQSALSKDPNEKRDHMVLLEFVTAAGITLGMDELYKGSGATNFSLLKQAGDVEENPGPSDDKMAHHTLLLGSGHVGLRNLGNTCFLNAVLQCLSSTRPLRDFCLRRDFRQEVPGGGRAQELTEAFADVIGALWHPDSCEAVNPTRFRAVFQKYVPSFSGYSQQDAQEFLKLLMERLHLEINRRGRRAPPILANGPVPSPPRRGGALLEEPELSDDDRANLMWKRYLEREDSKIVDLFVGQLKSCLKCQACGYRSTTFEVFCDLSLPIPKKGFAGGKVSLRDCFNLFTKEEELESENAPVCDRCRQKTRSTKKLTVQRFPRILVLHLNRFSASRGSIKKSSVGVDFPLQRLSLGDFASDKAGSPVYQLYALCNHSGSVHYGHYTALCRCQTGWHVYNDSRVSPVSENQVASSEGYVLFYQLMQEPPRCL

SEQ ID NO: 272 - protein, 436 aa, Artificial Sequence
  Description of Artificial Sequence: Synthetic polypeptide
MVSKGEELFTGVVPILVELDGDVNGHKFSVSGEGEGDATYGKLTLKFICTTGKLPVPWPTLVTTLTWGVQCFSRYPDHMKQHDFFKSAMPEGYVQERTIFFKDDGNYKTRAEVKFEGDTLVNRIELKGIDFKEDGNILGHKLEYNYISHNVYITADKQKNGIKANFKIRHNIEDGSVQLADHYQQNTPIGDGPVLLPDNHYLSTQSALSKDPNEKRDHMVLLEFVTAAGITLGMDELYKGSGATNFSLLKQAGDVEENPGPATPMDAYLRKLGLYRKLVAKDGSCLFRAVAEQVLHSQSRHVEVRMACIHYLRENREKFEAFIEGSFEEYLKRLENPQEWVGQVEISALSLMYRKDFIIYREPNVSPSQVTENNFPEKVLLCFSNGNHYDIVYPIKYKESSAMCQSLLYELLYEKVFKTDVSKIVMELDTLEVADE

SEQ ID NO: 273 - protein, 770 aa, Artificial Sequence
  Description of Artificial Sequence: Synthetic polypeptide
MVSKGEELFTGVVPILVELDGDVNGHKFSVSGEGEGDATYGKLTLKFICTTGKLPVPWPTLVTTLTWGVQCFSRYPDHMKQHDFFKSAMPEGYVQERTIFFKDDGNYKTRAEVKFEGDTLVNRIELKGIDFKEDGNILGHKLEYNYISHNVYITADKQKNGIKANFKIRHNIEDGSVQLADHYQQNTPIGDGPVLLPDNHYLSTQSALSKDPNEKRDHMVLLEFVTAAGITLGMDELYKGSGATNFSLLKQAGDVEENPGPQVQLVESGGALVQPGGSLRLSCAASGFPVNRYSMRWYRQAPGKEREWVAGMSSAGDRSSYEDSVKGRFTISRDDARNTVYLQMNSLKPEDTAVYYCNVNVGFEYWGQGTQVTVSSPPSFSEGSGGSRTPEKGFSDREPTRPPRPILQRQDDIVQEKRLSRGISHASSSIVSLARSHVSSNGGGGGSNEHPLEMPICAFQLPDLTVYNEDFRSFIERDLIEQSMLVALEQAGRLNWWVSVDPTSQRLLPLATTGDGNCLLHAASLGMWGFHDRDLMLRKALYALMEKGVEKEALKRRWRWQQTQQNKESGLVYTEDEWQKEWNELIKLASSEPRMHLGTNGANCGGVESSEEPVYESLEEFHVFVLAHVLRRPIVVVADTMLRDSGGEAFAPIPFGGIYLPLEVPASQCHRSPLVLAYDQAHFSALVSMEQKENTKEQAVIPLTDSEYKLLPLHFAVDPGKGWEWGKDDSDNVRLASVILSLEVKLHLLHSYMNVKWIPLSSDAQAPLAQ

SEQ ID NO: 274 - protein, 571 aa, Artificial Sequence
  Description of Artificial Sequence: Synthetic polypeptide
MVSKGEELFTGVVPILVELDGDVNGHKFSVSGEGEGDATYGKLTLKFICTTGKLPVPWPTLVTTLTWGVQCFSRYPDHMKQHDFFKSAMPEGYVQERTIFFKDDGNYKTRAEVKFEGDTLVNRIELKGIDFKEDGNILGHKLEYNYISHNVYITADKQKNGIKANFKIRHNIEDGSVQLADHYQQNTPIGDGPVLLPDNHYLSTQSALSKDPNEKRDHMVLLEFVTAAGITLGMDELYKGSGATNFSLLKQAGDVEENPGPQVQLVESGGALVQPGGSLRLSCAASGFPVNRYSMRWYRQAPGKEREWVAGMSSAGDRSSYEDSVKGRFTISRDDARNTVYLQMNSLKPEDTAVYYCNVNVGFEYWGQGTQVTVSSDEKLALYLAEVEKQDKYLRQRNKYRFHIIPDGNCLYRAVSKTVYGDQSLHRELREQTVHYIADHLDHFSPLIEGDVGEFIIAAAQDGAWAGYPELLAMGQMLNVNIHLTTGGRLESPTVSTMIHYLGPEDSLRPSIWLSWLSNGHYDAVFDHSYPNPEYDNWCKQTQVQRKRDEELAKSMAISLSKMYIEQNACS

SEQ ID NO: 275 - protein, 828 aa, Artificial Sequence
  Description of Artificial Sequence: Synthetic polypeptide
MVSKGEELFTGVVPILVELDGDVNGHKFSVSGEGEGDATYGKLTLKFICTTGKLPVPWPTLVTTLTWGVQCFSRYPDHMKQHDFFKSAMPEGYVQERTIFFKDDGNYKTRAEVKFEGDTLVNRIELKGIDFKEDGNILGHKLEYNYISHNVYITADKQKNGIKANFKIRHNIEDGSVQLADHYQQNTPIGDGPVLLPDNHYLSTQSALSKDPNEKRDHMVLLEFVTAAGITLGMDELYKGSGATNFSLLKQAGDVEENPGPQVQLVESGGALVQPGGSLRLSCAASGFPVNRYSMRWYRQAPGKEREWVAGMSSAGDRSSYEDSVKGRFTISRDDARNTVYLQMNSLKPEDTAVYYCNVNVGFEYWGQGTQVTVSSLEVDFKKLKQIKNRMKKTDWLFLNACVGVVEGDLAAIEAYKSSGGDIARQLTADEVRLLNRPSAFDVGYTLVHLAIRFQRQDMLAILLTEVSQQAAKCIPAMVCPELTEQIRREIAASLHQRKGDFACYFLTDLVTFTLPADIEDLPPTVQEKLFDEVLDRDVQKELEEESPIINWSLELATRLDSRLYALWNRTAGDCLLDSVLQATWGIYDKDSVLRKALHDSLHDCSHWFYTRWKDWESWYSQSFGLHFSLREEQWQEDWAFILSLASQPGASLEQTHIFVLAHILRRPIIVYGVKYYKSFRGETLGYTRFQGVYLPLLWEQSFCWKSPIALGYTRGHFSALVAMENDGYGNRGAGANLNTDDDVTITFLPLVDSERKLLHVHFLSAQELGNEEQQEKLLREWLDCCVTEGGVLVAMQKSSRRRNHPLVTQMVEKWLDRYRQIRPCTSL

SEQ ID NO: 276 - protein, 746 aa, Artificial Sequence
  Description of Artificial Sequence: Synthetic polypeptide
MVSKGEELFTGVVPILVELDGDVNGHKFSVSGEGEGDATYGKLTLKFICTTGKLPVPWPTLVTTLTWGVQCFSRYPDHMKQHDFFKSAMPEGYVQERTIFFKDDGNYKTRAEVKFEGDTLVNRIELKGIDFKEDGNILGHKLEYNYISHNVYITADKQKNGIKANFKIRHNIEDGSVQLADHYQQNTPIGDGPVLLPDNHYLSTQSALSKDPNEKRDHMVLLEFVTAAGITLGMDELYKGSGATNFSLLKQAGDVEENPGPQVQLVESGGALVQPGGSLRLSCAASGFPVNRYSMRWYRQAPGKEREWVAGMSSAGDRSSYEDSVKGRFTISRDDARNTVYLQMNSLKPEDTAVYYCNVNVGFEYWGQGTQVTVSSSDDKMAHHTLLLGSGHVGLRNLGNTCFLNAVLQCLSSTRPLRDFCLRRDFRQEVPGGGRAQELTEAFADVIGALWHPDSCEAVNPTRFRAVFQKYVPSFSGYSQQDAQEFLKLLMERLHLEINRRGRRAPPILANGPVPSPPRRGGALLEEPELSDDDRANLMWKRYLEREDSKIVDLFVGQLKSCLKCQACGYRSTTFEVFCDLSLPIPKKGFAGGKVSLRDCFNLFTKEEELESENAPVCDRCRQKTRSTKKLTVQRFPRILVLHLNRFSASRGSIKKSSVGVDFPLQRLSLGDFASDKAGSPVYQLYALCNHSGSVHYGHYTALCRCQTGWHVYNDSRVSPVSENQVASSEGYVLFYQLMQEPPRCL

SEQ ID NO: 277 - protein, 551 aa, Artificial Sequence
  Description of Artificial Sequence: Synthetic polypeptide
MVSKGEELFTGVVPILVELDGDVNGHKFSVSGEGEGDATYGKLTLKFICTTGKLPVPWPTLVTTLTWGVQCFSRYPDHMKQHDFFKSAMPEGYVQERTIFFKDDGNYKTRAEVKFEGDTLVNRIELKGIDFKEDGNILGHKLEYNYISHNVYITADKQKNGIKANFKIRHNIEDGSVQLADHYQQNTPIGDGPVLLPDNHYLSTQSALSKDPNEKRDHMVLLEFVTAAGITLGMDELYKGSGATNFSLLKQAGDVEENPGPQVQLVESGGALVQPGGSLRLSCAASGFPVNRYSMRWYRQAPGKEREWVAGMSSAGDRSSYEDSVKGRFTISRDDARNTVYLQMNSLKPEDTAVYYCNVNVGFEYWGQGTQVTVSSATPMDAYLRKLGLYRKLVAKDGSCLFRAVAEQVLHSQSRHVEVRMACIHYLRENREKFEAFIEGSFEEYLKRLENPQEWVGQVEISALSLMYRKDFIIYREPNVSPSQVTENNFPEKVLLCFSNGNHYDIVYPIKYKESSAMCQSLLYELLYEKVFKTDVSKIVMELDTLEVADE

SEQ ID NO: 278 - protein, 775 aa, Artificial Sequence
  Description of Artificial Sequence: Synthetic polypeptide
MVSKGEELFTGVVPILVELDGDVNGHKFSVSGEGEGDATYGKLTLKFICTTGKLPVPWPTLVTTLTWGVQCFSRYPDHMKQHDFFKSAMPEGYVQERTIFFKDDGNYKTRAEVKFEGDTLVNRIELKGIDFKEDGNILGHKLEYNYISHNVYITADKQKNGIKANFKIRHNIEDGSVQLADHYQQNTPIGDGPVLLPDNHYLSTQSALSKDPNEKRDHMVLLEFVTAAGITLGMDELYKGSGATNFSLLKQAGDVEENPGPQVQLQESGGGLVQAGGSLRLSCAASGSIFALNIMGWYRQAPGKQRELVAAIHSGGTTNYANSVKGRFTISRDNAANTVYLQMNSLKPEDTAVYYCNVKDFGAIIYDYDYWGQGTQVTVSSPPSFSEGSGGSRTPEKGFSDREPTRPPRPILQRQDDIVQEKRLSRGISHASSSIVSLARSHVSSNGGGGGSNEHPLEMPICAFQLPDLTVYNEDFRSFIERDLIEQSMLVALEQAGRLNWWVSVDPTSQRLLPLATTGDGNCLLHAASLGMWGFHDRDLMLRKALYALMEKGVEKEALKRRWRWQQTQQNKESGLVYTEDEWQKEWNELIKLASSEPRMHLGTNGANCGGVESSEEPVYESLEEFHVFVLAHVLRRPIVVVADTMLRDSGGEAFAPIPFGGIYLPLEVPASQCHRSPLVLAYDQAHFSALVSMEQKENTKEQAVIPLTDSEYKLLPLHFAVDPGKGWEWGKDDSDNVRLASVILSLEVKLHLLHSYMNVKWIPLSSDAQAPLAQ

SEQ ID NO: 279 - protein, 576 aa, Artificial Sequence
  Description of Artificial Sequence: Synthetic polypeptide
MVSKGEELFTGVVPILVELDGDVNGHKFSVSGEGEGDATYGKLTLKFICTTGKLPVPWPTLVTTLTWGVQCFSRYPDHMKQHDFFKSAMPEGYVQERTIFFKDDGNYKTRAEVKFEGDTLVNRIELKGIDFKEDGNILGHKLEYNYISHNVYITADKQKNGIKANFKIRHNIEDGSVQLADHYQQNTPIGDGPVLLPDNHYLSTQSALSKDPNEKRDHMVLLEFVTAAGITLGMDELYKGSGATNFSLLKQAGDVEENPGPQVQLQESGGGLVQAGGSLRLSCAASGSIFALNIMGWYRQAPGKQRELVAAIHSGGTTNYANSVKGRFTISRDNAANTVYLQMNSLKPEDTAVYYCNVKDFGAIIYDYDYWGQGTQVTVSSDEKLALYLAEVEKQDKYLRQRNKYRFHIIPDGNCLYRAVSKTVYGDQSLHRELREQTVHYIADHLDHFSPLIEGDVGEFIIAAAQDGAWAGYPELLAMGQMLNVNIHLTTGGRLESPTVSTMIHYLGPEDSLRPSIWLSWLSNGHYDAVFDHSYPNPEYDNWCKQTQVQRKRDEELAKSMAISLSKMYIEQNACS

SEQ ID NO: 280 - protein, 834 aa, Artificial Sequence
  Description of Artificial Sequence: Synthetic polypeptide
MVSKGEELFTGVVPILVELDGDVNGHKFSVSGEGEGDATYGKLTLKFICTTGKLPVPWPTLVTTLTWGVQCFSRYPDHMKQHDFFKSAMPEGYVQERTIFFKDDGNYKTRAEVKFEGDTLVNRIELKGIDFKEDGNILGHKLEYNYISHNVYITADKQKNGIKANFKIRHNIEDGSVQLADHYQQNTPIGDGPVLLPDNHYLSTQSALSKDPNEKRDHMVLLEFVTAAGITLGMDELYKGSGATNFSLLKQAGDVEENPGPQVQLQESGGGLVQAGGSLRLSCAASGSIFALNIMGWYRQAPGKQRELVAAIHSGGTTNYANSVKGRFTISRDNAANTVYLQMNSLKPEDTAVYYCNVKDFGAIIYDYDYWGQGTQVTVSSLEVDFKKLKQIKNRMKKTDWLFLNACVGVVEGDLAAIEAYKSSGGDIARQLTADEVRLLNRPSAFDVGYTLVHLAIRFQRQDMLAILLTEVSQQAAKCIPAMVCPELTEQIRREIAASLHQRKGDFACYFLTDLVTFTLPADIEDLPPTVQEKLFDEVLDRDVQKELEEESPIINWSLELATRLDSRLYALWNRTAGDCLLDSVLQATWGIYDKDSVLRKALHDSLHDCSHWFYTRWKDWESWYSQSFGLHFSLREEQWQEDWAFILSLASQPGASLEQTHIFVLAHILRRPIIVYGVKYYKSFRGETLGYTRFQGVYLPLLWEQSFCWKSPIALGYTRGHFSALVAMENDGYGNRGAGANLNTDDDVTITFLPLVDSERKLLHVHFLSAQELGNEEQQEKLLREWLDCCVTEGGVLVAMQKSSRRRNHPLVTQMVEKWLDRYRQIRPCTSLS

SEQ ID NO: 281 - protein, 736 aa, Artificial Sequence
  Description of Artificial Sequence: Synthetic polypeptide
MVSKGEELFTGVVPILVELDGDVNGHKFSVSGEGEGDATYGKLTLKFICTTGKLPVPWPTLVTTLTWGVQCFSRYPDHMKQHDFFKSAMPEGYVQERTIFFKDDGNYKTRAEVKFEGDTLVNRIELKGIDFKEDGNILGHKLEYNYISHNVYITADKQKNGIKANFKIRHNIEDGSVQLADHYQQNTPIGDGPVLLPDNHYLSTQSALSKDPNEKRDHMVLLEFVTAAGITLGMDELYKGSGATNFQVQLQESGGGLVQAGGSLRLSCAASGSIFALNIMGWYRQAPGKQRELVAAIHSGGTTNYANSVKGRFTISRDNAANTVYLQMNSLKPEDTAVYYCNVKDFGAIIYDYDYWGQGTQVTVSSSDDKMAHHTLLLGSGHVGLRNLGNTCFLNAVLQCLSSTRPLRDFCLRRDFRQEVPGGGRAQELTEAFADVIGALWHPDSCEAVNPTRFRAVFQKYVPSFSGYSQQDAQEFLKLLMERLHLEINRRGRRAPPILANGPVPSPPRRGGALLEEPELSDDDRANLMWKRYLEREDSKIVDLFVGQLKSCLKCQACGYRSTTFEVFCDLSLPIPKKGFAGGKVSLRDCFNLFTKEEELESENAPVCDRCRQKTRSTKKLTVQRFPRILVLHLNRFSASRGSIKKSSVGVDFPLQRLSLGDFASDKAGSPVYQLYALCNHSGSVHYGHYTALCRCQTGWHVYNDSRVSPVSENQVASSEGYVLFYQLMQEPPRCL

SEQ ID NO: 282 - protein, 556 aa, Artificial Sequence
  Description of Artificial Sequence: Synthetic polypeptide
MVSKGEELFTGVVPILVELDGDVNGHKFSVSGEGEGDATYGKLTLKFICTTGKLPVPWPTLVTTLTWGVQCFSRYPDHMKQHDFFKSAMPEGYVQERTIFFKDDGNYKTRAEVKFEGDTLVNRIELKGIDFKEDGNILGHKLEYNYISHNVYITADKQKNGIKANFKIRHNIEDGSVQLADHYQQNTPIGDGPVLLPDNHYLSTQSALSKDPNEKRDHMVLLEFVTAAGITLGMDELYKGSGATNFSLLKQAGDVEENPGPQVQLQESGGGLVQAGGSLRLSCAASGSIFALNIMGWYRQAPGKQRELVAAIHSGGTTNYANSVKGRFTISRDNAANTVYLQMNSLKPEDTAVYYCNVKDFGAIIYDYDYWGQGTQVTVSSATPMDAYLRKLGLYRKLVAKDGSCLFRAVAEQVLHSQSRHVEVRMACIHYLRENREKFEAFIEGSFEEYLKRLENPQEWVGQVEISALSLMYRKDFIIYREPNVSPSQVTENNFPEKVLLCFSNGNHYDIVYPIKYKESSAMCQSLLYELLYEKVFKTDVSKIVMELDTLEVADE

SEQ ID NO: 283 - protein, 789 aa, Artificial Sequence
  Description of Artificial Sequence: Synthetic polypeptide
MVSKGEELFTGVVPILVELDGDVNGHKFSVSGEGEGDATYGKLTLKFICTTGKLPVPWPTLVTTLTWGVQCFSRYPDHMKQHDFFKSAMPEGYVQERTIFFKDDGNYKTRAEVKFEGDTLVNRIELKGIDFKEDGNILGHKLEYNYISHNVYITADKQKNGIKANFKIRHNIEDGSVQLADHYQQNTPIGDGPVLLPDNHYLSTQSALSKDPNEKRDHMVLLEFVTAAGITLGMDELYKGSGATNFSLLKQAGDVEENPGPMAQVQLVESGGGLVRPGGSLRLSCVDSERTSYPMGWFRRAPGKEREFVASITWSGIDPTYADSVADRFTTSRDVANNTLYLQMNSLKHEDTAVYYCAARAPVGQSSSPYDYDYWGQGTQVTVSSHHHHHHEPEAPPSFSEGSGGSRTPEKGFSDREPTRPPRPILQRQDDIVQEKRLSRGISHASSSIVSLARSHVSSNGGGGGSNEHPLEMPICAFQLPDLTVYNEDFRSFIERDLIEQSMLVALEQAGRLNWWVSVDPTSQRLLPLATTGDGNCLLHAASLGMWGFHDRDLMLRKALYALMEKGVEKEALKRRWRWQQTQQNKESGLVYTEDEWQKEWNELIKLASSEPRMHLGTNGANCGGVESSEEPVYESLEEFHVFVLAHVLRRPIVVVADTMLRDSGGEAFAPIPFGGIYLPLEVPASQCHRSPLVLAYDQAHFSALVSMEQKENTKEQAVIPLTDSEYKLLPLHFAVDPGKGWEWGKDDSDNVRLASVILSLEVKLHLLHSYMNVKWIPLSSDAQAPLAQ

SEQ ID NO: 284 - protein, 590 aa, Artificial Sequence
  Description of Artificial Sequence: Synthetic polypeptide
MVSKGEELFTGVVPILVELDGDVNGHKFSVSGEGEGDATYGKLTLKFICTTGKLPVPWPTLVTTLTWGVQCFSRYPDHMKQHDFFKSAMPEGYVQERTIFFKDDGNYKTRAEVKFEGDTLVNRIELKGIDFKEDGNILGHKLEYNYISHNVYITADKQKNGIKANFKIRHNIEDGSVQLADHYQQNTPIGDGPVLLPDNHYLSTQSALSKDPNEKRDHMVLLEFVTAAGITLGMDELYKGSGATNFSLLKQAGDVEENPGPMAQVQLVESGGGLVRPGGSLRLSCVDSERTSYPMGWFRRAPGKEREFVASITWSGIDPTYADSVADRFTTSRDVANNTLYLQMNSLKHEDTAVYYCAARAPVGQSSSPYDYDYWGQGTQVTVSSHHHHHHEPEADEKLALYLAEVEKQDKYLRQRNKYRFHIIPDGNCLYRAVSKTVYGDQSLHRELREQTVHYIADHLDHFSPLIEGDVGEFIIAAAQDGAWAGYPELLAMGQMLNVNIHLTTGGRLESPTVSTMIHYLGPEDSLRPSIWLSWLSNGHYDAVFDHSYPNPEYDNWCKQTQVQRKRDEELAKSMAISLSKMYIEQNACS

SEQ ID NO: 285 - protein, 848 aa, Artificial Sequence
  Description of Artificial Sequence: Synthetic polypeptide
MVSKGEELFTGVVPILVELDGDVNGHKFSVSGEGEGDATYGKLTLKFICTTGKLPVPWPTLVTTLTWGVQCFSRYPDHMKQHDFFKSAMPEGYVQERTIFFKDDGNYKTRAEVKFEGDTLVNRIELKGIDFKEDGNILGHKLEYNYISHNVYITADKQKNGIKANFKIRHNIEDGSVQLADHYQQNTPIGDGPVLLPDNHYLSTQSALSKDPNEKRDHMVLLEFVTAAGITLGMDELYKGSGATNFSLLKQAGDVEENPGPMAQVQLVESGGGLVRPGGSLRLSCVDSERTSYPMGWFRRAPGKEREFVASITWSGIDPTYADSVADRFTTSRDVANNTLYLQMNSLKHEDTAVYYCAARAPVGQSSSPYDYDYWGQGTQVTVSSHHHHHHEPEALEVDFKKLKQIKNRMKKTDWLFLNACVGVVEGDLAAIEAYKSSGGDIARQLTADEVRLLNRPSAFDVGYTLVHLAIRFQRQDMLAILLTEVSQQAAKCIPAMVCPELTEQIRREIAASLHQRKGDFACYFLTDLVTFTLPADIEDLPPTVQEKLFDEVLDRDVQKELEEESPIINWSLELATRLDSRLYALWNRTAGDCLLDSVLQATWGIYDKDSVLRKALHDSLHDCSHWFYTRWKDWESWYSQSFGLHFSLREEQWQEDWAFILSLASQPGASLEQTHIFVLAHILRRPIIVYGVKYYKSFRGETLGYTRFQGVYLPLLWEQSFCWKSPIALGYTRGHFSALVAMENDGYGNRGAGANLNTDDDVTITFLPLVDSERKLLHVHFLSAQELGNEEQQEKLLREWLDCCVTEGGVLVAMQKSSRRRNHPLVTQMVEKWLDRYRQIRPCTSLS

SEQ ID NO: 286 - protein, 765 aa, Artificial Sequence
  Description of Artificial Sequence: Synthetic polypeptide
MVSKGEELFTGVVPILVELDGDVNGHKFSVSGEGEGDATYGKLTLKFICTTGKLPVPWPTLVTTLTWGVQCFSRYPDHMKQHDFFKSAMPEGYVQERTIFFKDDGNYKTRAEVKFEGDTLVNRIELKGIDFKEDGNILGHKLEYNYISHNVYITADKQKNGIKANFKIRHNIEDGSVQLADHYQQNTPIGDGPVLLPDNHYLSTQSALSKDPNEKRDHMVLLEFVTAAGITLGMDELYKGSGATNFSLLKQAGDVEENPGPMAQVQLVESGGGLVRPGGSLRLSCVDSERTSYPMGWFRRAPGKEREFVASITWSGIDPTYADSVADRFTTSRDVANNTLYLQMNSLKHEDTAVYYCAARAPVGQSSSPYDYDYWGQGTQVTVSSHHHHHHEPEASDDKMAHHTLLLGSGHVGLRNLGNTCFLNAVLQCLSSTRPLRDFCLRRDFRQEVPGGGRAQELTEAFADVIGALWHPDSCEAVNPTRFRAVFQKYVPSFSGYSQQDAQEFLKLLMERLHLEINRRGRRAPPILANGPVPSPPRRGGALLEEPELSDDDRANLMWKRYLEREDSKIVDLFVGQLKSCLKCQACGYRSTTFEVFCDLSLPIPKKGFAGGKVSLRDCFNLFTKEEELESENAPVCDRCRQKTRSTKKLTVQRFPRILVLHLNRFSASRGSIKKSSVGVDFPLQRLSLGDFASDKAGSPVYQLYALCNHSGSVHYGHYTALCRCQTGWHVYNDSRVSPVSENQVASSEGYVLFYQLMQEPPRCL

SEQ ID NO: 287 - protein, 570 aa, Artificial Sequence
  Description of Artificial Sequence: Synthetic polypeptide
MVSKGEELFTGVVPILVELDGDVNGHKFSVSGEGEGDATYGKLTLKFICTTGKLPVPWPTLVTTLTWGVQCFSRYPDHMKQHDFFKSAMPEGYVQERTIFFKDDGNYKTRAEVKFEGDTLVNRIELKGIDFKEDGNILGHKLEYNYISHNVYITADKQKNGIKANFKIRHNIEDGSVQLADHYQQNTPIGDGPVLLPDNHYLSTQSALSKDPNEKRDHMVLLEFVTAAGITLGMDELYKGSGATNFSLLKQAGDVEENPGPMAQVQLVESGGGLVRPGGSLRLSCVDSERTSYPMGWFRRAPGKEREFVASITWSGIDPTYADSVADRFTTSRDVANNTLYLQMNSLKHEDTAVYYCAARAPVGQSSSPYDYDYWGQGTQVTVSSHHHHHHEPEAATPMDAYLRKLGLYRKLVAKDGSCLFRAVAEQVLHSQSRHVEVRMACIHYLRENREKFEAFIEGSFEEYLKRLENPQEWVGQVEISALSLMYRKDFIIYREPNVSPSQVTENNFPEKVLLCFSNGNHYDIVYPIKYKESSAMCQSLLYELLYEKVFKTDVSKIVMELDTLEVADE

SEQ ID NO: 288 - protein, 780 aa, Artificial Sequence
  Description of Artificial Sequence: Synthetic polypeptide
MVSKGEELFTGVVPILVELDGDVNGHKFSVSGEGEGDATYGKLTLKFICTTGKLPVPWPTLVTTLTWGVQCFSRYPDHMKQHDFFKSAMPEGYVQERTIFFKDDGNYKTRAEVKFEGDTLVNRIELKGIDFKEDGNILGHKLEYNYISHNVYITADKQKNGIKANFKIRHNIEDGSVQLADHYQQNTPIGDGPVLLPDNHYLSTQSALSKDPNEKRDHMVLLEFVTAAGITLGMDELYKGSGATNFSLLKQAGDVEENPGPGPGSQVQLQESGGGLVQAGDSLRLSCAASGFDFDNFDDYAIGWFRQAPGQEREGVSCIDPSDGSTIYADSAKGRFTISSDNAENTVYLQMNSLKPEDTAVYVCSAWTLFHSDEYWGQGTQVTVSSPPSFSEGSGGSRTPEKGFSDREPTRPPRPILQRQDDIVQEKRLSRGISHASSSIVSLARSHVSSNGGGGGSNEHPLEMPICAFQLPDLTVYNEDFRSFIERDLIEQSMLVALEQAGRLNWWVSVDPTSQRLLPLATTGDGNCLLHAASLGMWGFHDRDLMLRKALYALMEKGVEKEALKRRWRWQQTQQNKESGLVYTEDEWQKEWNELIKLASSEPRMHLGTNGANCGGVESSEEPVYESLEEFHVFVLAHVLRRPIVVVADTMLRDSGGEAFAPIPFGGIYLPLEVPASQCHRSPLVLAYDQAHFSALVSMEQKENTKEQAVIPLTDSEYKLLPLHFAVDPGKGWEWGKDDSDNVRLASVILSLEVKLHLLHSYMNVKWIPLSSDAQAPLAQ

SEQ ID NO: 289 - protein, 581 aa, Artificial Sequence
  Description of Artificial Sequence: Synthetic polypeptide
MVSKGEELFTGVVPILVELDGDVNGHKFSVSGEGEGDATYGKLTLKFICTTGKLPVPWPTLVTTLTWGVQCFSRYPDHMKQHDFFKSAMPEGYVQERTIFFKDDGNYKTRAEVKFEGDTLVNRIELKGIDFKEDGNILGHKLEYNYISHNVYITADKQKNGIKANFKIRHNIEDGSVQLADHYQQNTPIGDGPVLLPDNHYLSTQSALSKDPNEKRDHMVLLEFVTAAGITLGMDELYKGSGATNFSLLKQAGDVEENPGPGPGSQVQLQESGGGLVQAGDSLRLSCAASGFDFDNFDDYAIGWFRQAPGQEREGVSCIDPSDGSTIYADSAKGRFTISSDNAENTVYLQMNSLKPEDTAVYVCSAWTLFHSDEYWGQGTQVTVSSDEKLALYLAEVEKQDKYLRQRNKYRFHIIPDGNCLYRAVSKTVYGDQSLHRELREQTVHYIADHLDHFSPLIEGDVGEFIIAAAQDGAWAGYPELLAMGQMLNVNIHLTTGGRLESPTVSTMIHYLGPEDSLRPSIWLSWLSNGHYDAVFDHSYPNPEYDNWCKQTQVQRKRDEELAKSMAISLSKMYIEQNACS

SEQ ID NO: 290 - protein, 839 aa, Artificial Sequence
  Description of Artificial Sequence: Synthetic polypeptide
MVSKGEELFTGVVPILVELDGDVNGHKFSVSGEGEGDATYGKLTLKFICTTGKLPVPWPTLVTTLTWGVQCFSRYPDHMKQHDFFKSAMPEGYVQERTIFFKDDGNYKTRAEVKFEGDTLVNRIELKGIDFKEDGNILGHKLEYNYISHNVYITADKQKNGIKANFKIRHNIEDGSVQLADHYQQNTPIGDGPVLLPDNHYLSTQSALSKDPNEKRDHMVLLEFVTAAGITLGMDELYKGSGATNFSLLKQAGDVEENPGPGPGSQVQLQESGGGLVQAGDSLRLSCAASGFDFDNFDDYAIGWFRQAPGQEREGVSCIDPSDGSTIYADSAKGRFTISSDNAENTVYLQMNSLKPEDTAVYVCSAWTLFHSDEYWGQGTQVTVSSLEVDFKKLKQIKNRMKKTDWLFLNACVGVVEGDLAAIEAYKSSGGDIARQLTADEVRLLNRPSAFDVGYTLVHLAIRFQRQDMLAILLTEVSQQAAKCIPAMVCPELTEQIRREIAASLHQRKGDFACYFLTDLVTFTLPADIEDLPPTVQEKLFDEVLDRDVQKELEEESPIINWSLELATRLDSRLYALWNRTAGDCLLDSVLQATWGIYDKDSVLRKALHDSLHDCSHWFYTRWKDWESWYSQSFGLHFSLREEQWQEDWAFILSLASQPGASLEQTHIFVLAHILRRPIIVYGVKYYKSFRGETLGYTRFQGVYLPLLWEQSFCWKSPIALGYTRGHFSALVAMENDGYGNRGAGANLNTDDDVTITFLPLVDSERKLLHVHFLSAQELGNEEQQEKLLREWLDCCVTEGGVLVAMQKSSRRRNHPLVTQMVEKWLDRYRQIRPCTSLS

SEQ ID NO: 291 - protein, 756 aa, Artificial Sequence
  Description of Artificial Sequence: Synthetic polypeptide
MVSKGEELFTGVVPILVELDGDVNGHKFSVSGEGEGDATYGKLTLKFICTTGKLPVPWPTLVTTLTWGVQCFSRYPDHMKQHDFFKSAMPEGYVQERTIFFKDDGNYKTRAEVKFEGDTLVNRIELKGIDFKEDGNILGHKLEYNYISHNVYITADKQKNGIKANFKIRHNIEDGSVQLADHYQQNTPIGDGPVLLPDNHYLSTQSALSKDPNEKRDHMVLLEFVTAAGITLGMDELYKGSGATNFSLLKQAGDVEENPGPGPGSQVQLQESGGGLVQAGDSLRLSCAASGFDFDNFDDYAIGWFRQAPGQEREGVSCIDPSDGSTIYADSAKGRFTISSDNAENTVYLQMNSLKPEDTAVYVCSAWTLFHSDEYWGQGTQVTVSSSDDKMAHHTLLLGSGHVGLRNLGNTCFLNAVLQCLSSTRPLRDFCLRRDFRQEVPGGGRAQELTEAFADVIGALWHPDSCEAVNPTRFRAVFQKYVPSFSGYSQQDAQEFLKLLMERLHLEINRRGRRAPPILANGPVPSPPRRGGALLEEPELSDDDRANLMWKRYLEREDSKIVDLFVGQLKSCLKCQACGYRSTTFEVFCDLSLPIPKKGFAGGKVSLRDCFNLFTKEEELESENAPVCDRCRQKTRSTKKLTVQRFPRILVLHLNRFSASRGSIKKSSVGVDFPLQRLSLGDFASDKAGSPVYQLYALCNHSGSVHYGHYTALCRCQTGWHVYNDSRVSPVSENQVASSEGYVLFYQLMQEPPRCL

SEQ ID NO: 292 - protein, 561 aa, Artificial Sequence
  Description of Artificial Sequence: Synthetic polypeptide
MVSKGEELFTGVVPILVELDGDVNGHKFSVSGEGEGDATYGKLTLKFICTTGKLPVPWPTLVTTLTWGVQCFSRYPDHMKQHDFFKSAMPEGYVQERTIFFKDDGNYKTRAEVKFEGDTLVNRIELKGIDFKEDGNILGHKLEYNYISHNVYITADKQKNGIKANFKIRHNIEDGSVQLADHYQQNTPIGDGPVLLPDNHYLSTQSALSKDPNEKRDHMVLLEFVTAAGITLGMDELYKGSGATNFSLLKQAGDVEENPGPGPGSQVQLQESGGGLVQAGDSLRLSCAASGFDFDNFDDYAIGWFRQAPGQEREGVSCIDPSDGSTIYADSAKGRFTISSDNAENTVYLQMNSLKPEDTAVYVCSAWTLFHSDEYWGQGTQVTVSSATPMDAYLRKLGLYRKLVAKDGSCLFRAVAEQVLHSQSRHVEVRMACIHYLRENREKFEAFIEGSFEEYLKRLENPQEWVGQVEISALSLMYRKDFIIYREPNVSPSQVTENNFPEKVLLCFSNGNHYDIVYPIKYKESSAMCQSLLYELLYEKVFKTDVSKIVMELDTLEVADE

SEQ ID NO: 293 - protein, 394 aa, Homo sapiens; identical to SEQ ID NO: 259

SEQ ID NO: 294 - protein, 221 aa, Homo sapiens
MEAGGFLDSLIYGACVVFTLGMFSAGLSDLRHMRMTRSVDNVQFLPFLTTEVNNLGWLSYGALKGDGILIVVNTVGAALQTLYILAYLHYCPRKRVVLLQTATLLGVLLLGYGYFWLLVPNPEARLQQLGLFCSVFTISMYLSPLADLAKVIQTKSTQCLSYPLTIATLLTSASWCLYGFRLRDPYIMVSNFPGIVTSFIRFWLFWKYPQEQDRNYWLLQT

SEQ ID NO: 295 - protein, 79 aa, Homo sapiens
MELEAMSRYTSPVNPAVFPHLTVVLLAIGMFFTAWFFVYEVTSTKYTRDIYKELLISLVASLFMGFGVLFLLLWVGIYV

SEQ ID NO: 296 - protein, 695 aa, Homo sapiens
MALLLVSLLAFLSLGSGCHHRICHCSNRVFLCQESKVTEIPSDLPRNAIELRFVLTKLRVIQKGAFSGFGDLEKIEISQNDVLEVIEADVFSNLPKLHEIRIEKANNLLYINPEAFQNLPNLQYLLISNTGIKHLPDVHKIHSLQKVLLDIQDNINIHTIERNSFVGLSFESVILWLNKNGIQEIHNCAFNGTQLDELNLSDNNNLEELPNDVFHGASGPVILDISRTRIHSLPSYGLENLKKLRARSTYNLKKLPTLEKLVALMEASLTYPSHCCAFANWRRQISELHPICNKSILRQEVDYMTQARGQRSSLAEDNESSYSRGFDMTYTEFDYDLCNEVVDVTCSPKPDAFNPCEDIMGYNILRVLIWFISILAITGNIIVLVILTTSQYKLTVPRFLMCNLAFADLCIGIYLLLIASVDIHTKSQYHNYAIDWQTGAGCDAAGFFTVFASELSVYTLTAITLERWHTITHAMQLDCKVQLRHAASVMVMGWIFAFAAALFPIFGISSYMKVSICLPMDIDSPLSQLYVMSLLVLNVLAFVVICGCYIHIYLTVRNPNIVSSSSDTRIAKRMAMLIFTDFLCMAPISFFAISASLKVPLITVSKAKILLVLFHPINSCANPFLYAIFTKNFRRDFFILLSKCGCYEMQAQIYRTETSSTVHNTHPRNGHCSSAPRVTNGSTYILVPLSHLAQN

SEQ ID NO: 297 - protein, 25 aa, Artificial Sequence
  Description of Artificial Sequence: Synthetic peptide
GGGGSGGGGSGGGGSGGGGSGGGGS

SEQ ID NO: 298 - protein, 20 aa, Artificial Sequence
  Description of Artificial Sequence: Synthetic peptide
GGGGSGGGGSGGGGSGGGGS

SEQ ID NO: 299 - protein, 15 aa, Artificial Sequence
  Description of Artificial Sequence: Synthetic peptide
GGGGSGGGGSGGGGS

SEQ ID NO: 300 - protein, 10 aa, Artificial Sequence
  Description of Artificial Sequence: Synthetic peptide
GGGGSGGGGS

SEQ ID NO: 301 - protein, 5 aa, Artificial Sequence
  Description of Artificial Sequence: Synthetic peptide
GGGGS

SEQ ID NO: 302 - protein, 16 aa, Artificial Sequence
  Description of Artificial Sequence: Synthetic peptide
SGGGGSGGGGSGGGGS

SEQ ID NO: 303 - protein, 15 aa, Artificial Sequence
  Description of Artificial Sequence: Synthetic peptide
SGGGGSGGGGSGGGG

SEQ ID NO: 304 - protein, 10 aa, Artificial Sequence
  Description of Artificial Sequence: Synthetic peptide
SGGGGSGGGG

SEQ ID NO: 305 - protein, 5 aa, Artificial Sequence
  Description of Artificial Sequence: Synthetic peptide
SGGGG

SEQ ID NO: 306 - protein, 5 aa, Artificial Sequence
  Description of Artificial Sequence: Synthetic peptide
GGSGG

SEQ ID NO: 307 - protein, 30 aa, Artificial Sequence
  Description of Artificial Sequence: Synthetic polypeptide
AHFKISGEKRPSTDPGKKAKNPKKKKKKDP

SEQ ID NO: 308 - protein, 12 aa, Artificial Sequence
  Description of Artificial Sequence: Synthetic peptide
AHRAKKMSKTHA

SEQ ID NO: 309 - protein, 14 aa, Artificial Sequence
  Description of Artificial Sequence: Synthetic peptide
ASPEYVNLPINGNG

SEQ ID NO: 310 - protein, 7 aa, Artificial Sequence
  Description of Artificial Sequence: Synthetic peptide
CTKRPRW

SEQ ID NO: 311 - protein, 16 aa, Artificial Sequence
  Description of Artificial Sequence: Synthetic peptide
DKAKRVSRNKSEKKRR

SEQ ID NO: 312 - protein, 15 aa, Artificial Sequence
  Description of Artificial Sequence: Synthetic peptide
EELRLKEELLKGIYA

SEQ ID NO: 313 - protein, 16 aa, Artificial Sequence
  Description of Artificial Sequence: Synthetic peptide
EEQLRRRKNSRLNNTG

SEQ ID NO: 314 - protein, 24 aa, Artificial Sequence
  Description of Artificial Sequence: Synthetic peptide
EVLKVIRTGKRKKKAWKRMVTKVC

SEQ ID NO: 315 - protein, 15 aa, Artificial Sequence
  Description of Artificial Sequence: Synthetic peptide
HHHHHHHHHHHHQPH

SEQ ID NO: 316 - protein, 17 aa, Artificial Sequence
  Description of Artificial Sequence: Synthetic peptide
HKKKHPDASVNFSEFSK

SEQ ID NO: 317 - protein, 9 aa, Artificial Sequence
  Description of Artificial Sequence: Synthetic peptide
HKRTKKNLS

SEQ ID NO: 318 - protein, 29 aa, Artificial Sequence
  Description of Artificial Sequence: Synthetic peptide
IINGRKLKLKKSRRRSSQTSNNSFTSRRS

SEQ ID NO: 319 - protein, 8 aa, Artificial Sequence
  Description of Artificial Sequence: Synthetic peptide
KAEQERRK

SEQ ID NO: 320 - protein, 18 aa, Artificial Sequence
  Description of Artificial Sequence: Synthetic peptide
KEKRKRREELFIEQKKRK

SEQ ID NO: 321 - protein, 14 aa, Artificial Sequence
  Description of Artificial Sequence: Synthetic peptide
KKGKDEWFSRGKKP

SEQ ID NO: 322 - protein, 15 aa, Artificial Sequence
  Description of Artificial Sequence: Synthetic peptide
KKGPSVQKRKKTNLS

SEQ ID NO: 323 - protein, 16 aa, Artificial Sequence
  Description of Artificial Sequence: Synthetic peptide
KKKTVINDLLHYKKEK

SEQ ID NO: 324 - protein, 17 aa, Artificial Sequence
  Description of Artificial Sequence: Synthetic peptide
KKNGGKGKNKPSAKIKK

SEQ ID NO: 325 - protein, 13 aa, Artificial Sequence
  Description of Artificial Sequence: Synthetic peptide
KKPKWDDFKKKKK

SEQ ID NO: 326 - protein, 9 aa, Artificial Sequence
  Description of Artificial Sequence: Synthetic peptide
KKRKKDNLS

SEQ ID NO: 327 - protein, 9 aa, Artificial Sequence
  Description of Artificial Sequence: Synthetic peptide
KKRRKRRRK

SEQ ID NO: 328 - protein, 9 aa, Artificial Sequence
  Description of Artificial Sequence: Synthetic peptide
KKRRRRARK

SEQ ID NO: 329 - protein, 7 aa, Artificial Sequence
  Description of Artificial Sequence: Synthetic peptide
KKSKRGR

SEQ ID NO: 330 - protein, 8 aa, Artificial Sequence
  Description of Artificial Sequence: Synthetic peptide
KKSRKRGS

SEQ ID NO: 331 - protein, 17 aa, Artificial Sequence
  Description of Artificial Sequence: Synthetic peptide
KKSTALSRELGKIMRRR

SEQ ID NO: 332 - protein, 17 aa, Artificial Sequence
  Description of Artificial Sequence: Synthetic peptide
KKSYQDPEIIAHSRPRK

SEQ ID NO: 333 - protein, 17 aa, Artificial Sequence
  Description of Artificial Sequence: Synthetic peptide
KKTGKNRKLKSKRVKTR

SEQ ID NO: 334 - protein, 17 aa, Artificial Sequence
  Description of Artificial Sequence: Synthetic peptide
KKVSIAGQSGKLWRWKR

SEQ ID NO: 335 - protein, 20 aa, Artificial Sequence
  Description of Artificial Sequence: Synthetic peptide
KKYENVVIKRSPRKRGRPRK

SEQ ID NO: 336 - protein, 6 aa, Artificial Sequence
  Description of Artificial Sequence: Synthetic peptide
KNKKRK

SEQ ID NO: 337 - protein, 6 aa, Artificial Sequence
  Description of Artificial Sequence: Synthetic peptide
KPKKKR

SEQ ID NO: 338 - protein, 19 aa, Artificial Sequence
  Description of Artificial Sequence: Synthetic peptide
KRAMKDDSHGNSTSPKRRK

SEQ ID NO: 339 - protein, 17 aa, Artificial Sequence
  Description of Artificial Sequence: Synthetic peptide
KRANSNLVAAYEKAKKK

SEQ ID NO: 340 - protein, 22 aa, Artificial Sequence
  Description of Artificial Sequence: Synthetic peptide
KRASEDTTSGSPPKKSSAGPKR

SEQ ID NO: 341 - protein, 16 aa, Artificial Sequence
  Description of Artificial Sequence: Synthetic peptide
KRFKRRWMVRKMKTKK

SEQ ID NO: 342 - protein, 16 aa, Artificial Sequence
  Description of Artificial Sequence: Synthetic peptide
KRGLNSSFETSPKKVK

SEQ ID NO: 343 - protein, 20 aa, Artificial Sequence
  Description of Artificial Sequence: Synthetic peptide
KRGNSSIGPNDLSKRKQRKK

SEQ ID NO: 344 - protein, 23 aa, Artificial Sequence
  Description of Artificial Sequence: Synthetic peptide
KRIHSVSLSQSQIDPSKKVKRAK

SEQ ID NO: 345 - protein, 15 aa, Artificial Sequence
  Description of Artificial Sequence: Synthetic peptide
KRKGKLKNKGSKRKK

SEQ ID NO: 346 - protein, 13 aa, Artificial Sequence
  Description of Artificial Sequence: Synthetic peptide
KRRRRRRREKRKR

SEQ ID NO: 347 - protein, 18 aa, Artificial Sequence
  Description of Artificial Sequence: Synthetic peptide
KRSNDRTYSPEEEKQRRA

SEQ ID NO: 348 - protein, 21 aa, Artificial Sequence
  Description of Artificial Sequence: Synthetic peptide
KRTVATNGDASGAHRAKKMSK

SEQ ID NO: 349 - protein, 20 aa, Artificial Sequence
  Description of Artificial Sequence: Synthetic peptide
KRVYNKGEDEQEHLPKGKKR

SEQ ID NO: 350 - protein, 18 aa, Artificial Sequence
  Description of Artificial Sequence: Synthetic peptide
KSGKAPRRRAVSMDNSNK

SEQ ID NO: 351 - protein, 19 aa, Artificial Sequence
  Description of Artificial Sequence: Synthetic peptide
KVNFLDMSLDDIIIYKELE

SEQ ID NO: 352 - protein, 15 aa, Artificial Sequence
  Description of Artificial Sequence: Synthetic peptide
KVQHRIAKKTTRRRR

SEQ ID NO: 353 - protein, 8 aa, Artificial Sequence
  Description of Artificial Sequence: Synthetic peptide
LSPSLSPL

SEQ ID NO: 354 - protein, 30 aa, Artificial Sequence
  Description of Artificial Sequence: Synthetic polypeptide
MDSLLMNRRKFLYQFKNVRWAKGRRETYLC

SEQ ID NO: 355 - protein, 52 aa, Artificial Sequence
  Description of Artificial Sequence: Synthetic polypeptide
MPQNEYIELHRKRYGYRLDYHEKKRKKESREAHERSKKAKKMIGLKAKLYHK

SEQ ID NO: 356 - protein, 10 aa, Artificial Sequence
  Description of Artificial Sequence: Synthetic peptide
MVQLRPRASR

SEQ ID NO: 357 - protein, 24 aa, Artificial Sequence
  Description of Artificial Sequence: Synthetic peptide
NNKLLAKRRKGGASPKDDPMDDIK

SEQ ID NO: 358 - protein, 20 aa, Artificial Sequence
  Description of Artificial Sequence: Synthetic peptide
NYKRPMDGTYGPPAKRHEGE

SEQ ID NO: 359 - protein, 19 aa, Artificial Sequence
  Description of Artificial Sequence: Synthetic peptide
PDTKRAKLDSSETTMVKKK

SEQ ID NO: 360 - protein, 7 aa, Artificial Sequence
  Description of Artificial Sequence: Synthetic peptide
PEKRTKI

SEQ ID NO: 361 - protein, 8 aa, Artificial Sequence
  Description of Artificial Sequence: Synthetic peptide
PGGRGKKK

SEQ ID NO: 362 - protein, 18 aa, Artificial Sequence
  Description of Artificial Sequence: Synthetic peptide
PGKMDKGEHRQERRDRPY

SEQ ID NO: 363 - protein, 11 aa, Artificial Sequence
  Description of Artificial Sequence: Synthetic peptide
PKKGDKYDKTD

SEQ ID NO: 364 - protein, 7 aa, Artificial Sequence
  Description of Artificial Sequence: Synthetic peptide
PKKKSRK

SEQ ID NO: 365 - protein, 7 aa, Artificial Sequence
  Description of Artificial Sequence: Synthetic peptide
PKKNKPE

SEQ ID NO: 366 - protein, 7 aa, Artificial Sequence
  Description of Artificial Sequence: Synthetic peptide
PKKRAKV

SEQ ID NO: 367 - protein, 9 aa, Artificial Sequence
  Description of Artificial Sequence: Synthetic peptide
PKPKKLKVE

SEQ ID NO: 368 - protein, 7 aa, Artificial Sequence
  Description of Artificial Sequence: Synthetic peptide
PKRGRGR

SEQ ID NO: 369 - protein, 9 aa, Artificial Sequence
  Description of Artificial Sequence: Synthetic peptide
PKRRLVDDA

SEQ ID NO: 370 - protein, 7 aa, Artificial Sequence
  Description of Artificial Sequence: Synthetic peptide
PKRRRTY

SEQ ID NO: 371 - protein, 6 aa, Artificial Sequence
  Description of Artificial Sequence: Synthetic peptide
PLFKRR

SEQ ID NO: 372 - protein, 7 aa, Artificial Sequence
  Description of Artificial Sequence: Synthetic peptide
PLRKAKR

SEQ ID NO: 373 - protein, 9 aa, Artificial Sequence
  Description of Artificial Sequence: Synthetic peptide
PPAKRKCIF

SEQ ID NO: 374 - protein, 8 aa, Artificial Sequence
  Description of Artificial Sequence: Synthetic peptide
PPARRRRL

SEQ ID NO: 375 - protein, 8 aa, Artificial Sequence
  Description of Artificial Sequence: Synthetic peptide
PPKKKRKV

SEQ ID NO: 376 - protein, 10 aa, Artificial Sequence
  Description of Artificial Sequence: Synthetic peptide
PPNKRMKVKH

SEQ ID NO: 377 - protein, 13 aa, Artificial Sequence
  Description of Artificial Sequence: Synthetic peptide
PPRIYPQLPSAPT

SEQ ID NO: 378 - protein, 13 aa, Artificial Sequence
  Description of Artificial Sequence: Synthetic peptide
PQRSPFPKSSVKR

SEQ ID NO: 379 - protein, 8 aa, Artificial Sequence
  Description of Artificial Sequence: Synthetic peptide
PRPRKVPR

SEQ ID NO: 380 - protein, 9 aa, Artificial Sequence
  Description of Artificial Sequence: Synthetic peptide
PRRRVQRKR

SEQ ID NO: 381 - protein, 7 aa, Artificial Sequence
  Description of Artificial Sequence: Synthetic peptide
PRRVRLK

SEQ ID NO: 382 - protein, 7 aa, Artificial Sequence
  Description of Artificial Sequence: Synthetic peptide
PSRKRPR

SEQ ID NO: 383 - protein, 8 aa, Artificial Sequence
  Description of Artificial Sequence: Synthetic peptide
PSSKKRKV

SEQ ID NO: 384 - protein, 7 aa, Artificial Sequence
  Description of Artificial Sequence: Synthetic peptide
PTKKRVK

SEQ ID NO: 385 - protein, 9 aa, Artificial Sequence
  Description of Artificial Sequence: Synthetic peptide
QRPGPYDRP

SEQ ID NO: 386 - protein, 18 aa, Artificial Sequence
  Description of Artificial Sequence: Synthetic peptide
RGKGGKGLGKGGAKRHRK

SEQ ID NO: 387 - protein, 24 aa, Artificial Sequence
  Description of Artificial Sequence: Synthetic peptide
RKAGKGGGGHKTTKKRSAKDEKVP

SEQ ID NO: 388 - protein, 9 aa, Artificial Sequence
  Description of Artificial Sequence: Synthetic peptide
RKIKLKRAK

SEQ ID NO: 389 - protein, 9 aa, Artificial Sequence
  Description of Artificial Sequence: Synthetic peptide
RKIKRKRAK

SEQ ID NO: 390 - protein, 17 aa, Artificial Sequence
  Description of Artificial Sequence: Synthetic peptide
RKKEAPGPREELRSRGR

SEQ ID NO: 391 - protein, 7 aa, Artificial Sequence
  Description of Artificial Sequence: Synthetic peptide
RKKRKGK

SEQ ID NO: 392 - protein, 9 aa, Artificial Sequence
  Description of Artificial Sequence: Synthetic peptide
RKKRRQRRR

SEQ ID NO: 393 - protein, 25 aa, Artificial Sequence
  Description of Artificial Sequence: Synthetic peptide
RKKSIPLSIKNLKRKHKRKKNKITR

SEQ ID NO: 394 - protein, 20 aa, Artificial Sequence
  Description of Artificial Sequence: Synthetic peptide
RKLVKPKNTKMKTKLRTNPY

SEQ ID NO: 395 - protein, 16 aa, Artificial Sequence
  Description of Artificial Sequence: Synthetic peptide
RKRLILSDKGQLDWKK

SEQ ID NO: 396 - protein, 7 aa, Artificial Sequence
  Description of Artificial Sequence: Synthetic peptide
RKRLKSK

SEQ ID NO: 397 - protein, 9 aa, Artificial Sequence
  Description of Artificial Sequence: Synthetic peptide
RKRRVRDNM

SEQ ID NO: 398 - protein, 22 aa, Artificial Sequence
  Description of Artificial Sequence: Synthetic peptide
RKRSPKDKKEKDLDGAGKRRKT

SEQ ID NO: 399 - protein, 22 aa, Artificial Sequence
  Description of Artificial Sequence: Synthetic peptide
RKRTPRVDGQTGENDMNKRRRK

SEQ ID NO: 400 - protein, 10 aa, Artificial Sequence
  Description of Artificial Sequence: Synthetic peptide
RLPVRRRRRR

SEQ ID NO: 401 - protein, 10 aa, Artificial Sequence
  Description of Artificial Sequence: Synthetic peptide
RLRFRKPKSK

SEQ ID NO: 402 - protein, 6 aa, Artificial Sequence
  Description of Artificial Sequence: Synthetic peptide
RQQRKR

SEQ ID NO: 403 - protein, 16 aa, Artificial Sequence
  Description of Artificial Sequence: Synthetic peptide
RRDLNSSFETSPKKVK

SEQ ID NO: 404 - protein, 8 aa, Artificial Sequence
  Description of Artificial Sequence: Synthetic peptide
RRDRAKLR

SEQ ID NO: 405 - protein, 8 aa, Artificial Sequence
  Description of Artificial Sequence: Synthetic peptide
RRGDGRRR

SEQ ID NO: 406 - protein, 11 aa, Artificial Sequence
  Description of Artificial Sequence: Synthetic peptide
RRGRKRKAEKQ

SEQ ID NO: 407 - protein, 6 aa, Artificial Sequence
  Description of Artificial Sequence: Synthetic peptide
RRKKRR

SEQ ID NO: 408 - protein, 19 aa, Artificial Sequence
  Description of Artificial Sequence: Synthetic peptide
RRKRSKSEDMDSVESKRRR

SEQ ID NO: 409 - protein, 6 aa, Artificial Sequence
  Description of Artificial Sequence: Synthetic peptide
RRKRSR

SEQ ID NO: 410 - protein, 14 aa, Artificial Sequence
  Description of Artificial Sequence: Synthetic peptide
RRPKGKTLQKRKPK

SEQ ID NO: 411 - protein, 18 aa, Artificial Sequence
  Description of Artificial Sequence: Synthetic peptide
RRRGFERFGPDNMGRKRK

SEQ ID NO: 412 - protein, 15 aa, Artificial Sequence
  Description of Artificial Sequence: Synthetic peptide
RRRGKNKVAAQNCRK

SEQ ID NO: 413 - protein, 9 aa, Artificial Sequence
  Description of Artificial Sequence: Synthetic peptide
RRRKRRNLS

SEQ ID NO: 414 - protein, 14 aa, Artificial Sequence
  Description of Artificial Sequence: Synthetic peptide
RRRQKQKGGASRRR

SEQ ID NO: 415 - protein, 13 aa, Artificial Sequence
  Description of Artificial Sequence: Synthetic peptide
RRRREGPRARRRR

SEQ ID NO: 416 - protein, 61 aa, Artificial Sequence
  Description of Artificial Sequence: Synthetic polypeptide
RRTIRLKLVYDKCDRSCKIQKKNRNKCQYCRFHKCLSVGMSHNAIRFGRMPRSEKAKLKAE

SEQ ID NO: 417 - protein, 17 aa, Artificial Sequence
  Description of Artificial Sequence: Synthetic peptide
RRVPQRKEVSRCRKCRK

SEQ ID NO: 418 - protein, 32 aa, Artificial Sequence
  Description of Artificial Sequence: Synthetic polypeptide
RVGGRRQAVECIEDLLNEPGQPLDLSCKRPRP

SEQ ID NO: 419 - protein, 9 aa, Artificial Sequence
  Description of Artificial Sequence: Synthetic peptide
RVVKLRIAP

SEQ ID NO: 420 - protein, 6 aa, Artificial Sequence
  Description of Artificial Sequence: Synthetic peptide
RVVRRR

SEQ ID NO: 421 - protein, 12 aa, Artificial Sequence
  Description of Artificial Sequence: Synthetic peptide
SKRKTKISRKTR

SEQ ID NO: 422 - protein, 16 aa, Artificial Sequence
  Description of Artificial Sequence: Synthetic peptide
SYVKTVPNRTRTYIKL

SEQ ID NO: 423 - protein, 12 aa, Artificial Sequence
  Description of Artificial Sequence: Synthetic peptide
TGKNEAKKRKIA

SEQ ID NO: 424 - protein, 30 aa, Artificial Sequence
  Description of Artificial Sequence: Synthetic polypeptide
TLSPASSPSSVSCPVIPASTDESPGSALNI

SEQ ID NO: 425 - protein, 170 aa, Artificial Sequence
  Description of Artificial Sequence: Synthetic polypeptide
VFTLEDFVGDWRQTAGYNLDQVLEQGGVSSLFQNLGVSVTPIQRIVLSGENGLKIDIHVIIPYEGLSGDQMGQIEKIFKVVYPVDDHHFKVILHYGTLVIDGVTPNMIDYFGRPYEGIAVFDGKKITVTGTLWNGNKIIDERLINPDGSLLFRVTINGVTGWRLCERILA

SEQ ID NO: 426 - protein, 554 aa, Artificial Sequence
  Description of Artificial Sequence: Synthetic polypeptide
MEDAKNIKKGPAPFYPLEDGTAGEQLHKAMKRYALVPGTIAFTDAHIEVDITYAEYFEMSVRLAEAMKRYGLNTNHRIVVCSENSLQFFMPVLGALFIGVAVAPANDIYNERELLNSMGISQPTVVFVSKKGLQKILNVQKKLPIIQKIIIMDSKTDYQGFQSMYTFVTSHLPPGFNEYDFVPESFDRDKTIALIMNSSGSTGLPKGVALPHRTACVRFSHARDPIFGNQIIPDTAILSVVPFHHGFGMFTTLGYLICGFRVVLMYRFEEELFLRSLQDYKIQSALLVPTLFSFFAKSTLIDKYDLSNLHEIASGGAPLSKEVGEAVAKRFHLPGIRQGYGLTETTSAILITPEGDDKPGAVGKVVPFFEAKVVDLDTGKTLGVNQRGELCVRGPMIMSGYVNNPEATNALIDKDGWLHSGDIAYWDEDEHFFIVDRLKSLIKYKGYQVAPAELESILLQHPNIFDAGVAGLPDDDAGELPAAVVVLEHGKTMTEKEIVDYVASQVTTAKKLRGGVVFVDEVPKGLTGKLDARKIREILIKAKKGGKIAVTRLK

SEQ ID NO: 427 - protein, 15 aa, Artificial Sequence
  Description of Artificial Sequence: Synthetic peptide
PSRLEEELRRRLTEP

SEQ ID NO: 428 - protein, 22 aa, Artificial Sequence
  Description of Artificial Sequence: Synthetic peptide
GSGATNFSLLKQAGDVEENPGP

SEQ ID NO: 429 - protein, 394 aa, Artificial Sequence; identical to SEQ ID NO: 259
  Description of Artificial Sequence: Synthetic polypeptide

SEQ ID NO: 430 - protein, 1657 aa, Artificial Sequence
  Description of Artificial Sequence: Synthetic polypeptide
MGRVGYWTLLVLPALLVWRGPAPSAAAEKGPPALNIAVMLGHSHDVTERELRTLWGPEQAAGLPLDVNVVALLMNRTDPKSLITHVCDLMSGARIHGLVFGDDTDQEAVAQMLDFISSHTFVPILGIHGGASMIMADKDPTSTFFQFGASIQQQATVMLKIMQDYDWHVFSLVTTIFPGYREFISFVKTTVDNSFVGWDMQNVITLDTSFEDAKTQVQLKKIHSSVILLYCSKDEAVLILSEARSLGLTGYDFFWIVPSLVSGNTELIPKEFPSGLISVSYDDWDYSLEARVRDGIGILTTAASSMLEKFSYIPEAKASCYGQMERPEVPMHTLHPFMVNVTWDGKDLSFTEEGYQVHPRLVVIVLNKDREWEKVGKWENHTLSLRHAVWPRYKSFSDCEPDDNHLSIVTLEEAPFVIVEDIDPLTETCVRNTVPCRKFVKINNSTNEGMNVKKCCKGFCIDILKKLSRTVKFTYDLYLVTNGKHGKKVNNVWNGMIGEVVYQRAVMAVGSLTINEERSEVVDFSVPFVETGISVMVSRSNGTVSPSAFLEPFSASVWVMMFVMLLIVSAIAVFVFEYFSPVGYNRNLAKGKAPHGPSFTIGKAIWLLWGLVFNNSVPVQNPKGTTSKIMVSVWAFFAVIFLASYTANLAAFMIQEEFVDQVTGLSDKKFQRPHDYSPPFRFGTVPNGSTERNIRNNYPYMHQYMTKFNQKGVEDALVSLKTGKLDAFIYDAAVLNYKAGRDEGCKLVTIGSGYIFATTGYGIALQKGSPWKRQIDLALLQFVGDGEMEELETLWLTGICHNEKNEVMSSQLDIDNMAGVFYMLAAAMALSLITFIWEHLFYWKLRFCFTGVCSDRPGLLFSISRGIYSCIHGVHIEEKKKSPDFNLTGSQSNMLKLLRSAKNISSMSNMNSSRMDSPKRAADFIQRGSLIMDMVSDKGNLMYSDNRSFQGKESIFGDNMNELQTFVANRQKDNLNNYVFQGQHPLTLNESNPNTVEVAVSTESKANSRPRQLWKKSVDSIRQDSLSQNPVSQRDEATAENRTHSLKSPRYLPEEMAHSDISETSNRATCHREPDNSKNHKTKDNFKRSVASKYPKDCSEVERTYLKTKSSSPRDKIYTIDGEKEPGFHLDPPQFVENVTLPENVDFPDPYQDPSENFRKGDSTLPMNRNPLHNEEGLSNNDQYKLYSKHFTLKDKGSPHSETSERYRQNSTHCRSCLSNMPTYSGHFTMRSPFKCDACLRMGNLYDIDEDQMLQETGNPATGEQVYQQDWAQNNALQLQKNKLRISRQHSYDNIVDKPRELDLSRPSRSISLKDRERLLEGNFYGSLFSVPSSKLSGKKSSLFPQGLEDSKRSKSLLPDHTSDNPFLHSHRDDQRLVIGRCPSDPYKHSLPSQAVNDSYLRSSLRSTASYCSRDSRGHNDVYISEHVMPYAANKNNMYSTPRVLNSCSNRRVYKKMPSIESDVKVPVFTLEDFVGDWRQTAGYNLDQVLEQGGVSSLFQNLGVSVTPIQRIVLSGENGLKIDIHVIIPYEGLSGDQMGQIEKIFKVVYPVDDHHFKVILHYGTLVIDGVTPNMIDYFGRPYEGIAVFDGKKITVTGTLWNGNKIIDERLINPDGSLLFRVTINGVTGWRLCERILAGGGGSPSRLEEELRRRLTEP

SEQ ID NO: 431 - protein, 685 aa, Artificial Sequence
  Description of Artificial Sequence: Synthetic polypeptide
MEPSSKKLTGRLMLAVGGAVLGSLQFGYNTGVINAPQKVIEEFYNQTWVHRYGESILPTTLTTLWSLSVAIFSVGGMIGSFSVGLFVNRFGRRNSMLMMNLLAFVSAVLMGFSKLGKSFEMLILGRFIIGVYCGLTTGFVPMYVGEVSPTALRGALGTLHQLGIVVGILIAQVFGLDSIMGNKDLWPLLLSIIFIPALLQCIVLPFCPESPRFLLINRNEENRAKSVLKKLRGTADVTHDLQEMKEESRQMMREKKVTILELFRSPAYRQPILIAVVLQLSQQLSGINAVFYYSTSIFEKAGVQQPVYATIGSGIVNTAFTVVSLFVVERAGRRTLHLIGLAGMAGCAILMTIALALLEQLPWMSYLSIVAIFGFVAFFEVGPGPIPWFIVAELFSQGPRPAAIAVAGFSNWTSNFIVGMCFQYVEQLCGPYVFIIFTVLLVLFFIFTYFKVPETKGRTFDEIASGFRQGGASQSDKTPEELFHPLGADSQVKVPVFTLEDFVGDWRQTAGYNLDQVLEQGGVSSLFQNLGVSVTPIQRIVLSGENGLKIDIHVIIPYEGLSGDQMGQIEKIFKVVYPVDDHHFKVILHYGTLVIDGVTPNMIDYFGRPYEGIAVFDGKKITVTGTLWNGNKIIDERLINPDGSLLFRVTINGVTGWRLCERILAGGGGSPSRLEEELRRRLTEP

SEQ ID NO: 432 - protein, 2699 aa, Artificial Sequence
  Description of Artificial Sequence: Synthetic polypeptide
MARFGDEMPARYGGGGSGAAAGVVVGSGGGRGAGGSRQGGQPGAQRMYKQSMAQRARTMALYNPIPVRQNCLTVNRSLFLFSEDNVVRKYAKKITEWPPFEYMILATIIANCIVLALEQHLPDDDKTPMSERLDDTEPYFIGIFCFEAGIKIIALGFAFHKGSYLRNGWNVMDFVVVLTGILATVGTEFDLRTLRAVRVLRPLKLVSGIPSLQVVLKSIMKAMIPLLQIGLLLFFAILIFAIIGLEFYMGKFHTTCFEEGTDDIQGESPAPCGTEEPARTCPNGTKCQPYWEGPNNGITQFDNILFAVLTVFQCITMEGWTDLLYNSNDASGNTWNWLYFIPLIIIGSFFMLNLVLGVLSGEFAKERERVENRRAFLKLRRQQQIERELNGYMEWISKAEEVILAEDETDGEQRHPFDALRRTTIKKSKTDLLNPEEAEDQLADIASVGSPFARASIKSAKLENSTFFHKKERRMRFYIRRMVKTQAFYWTVLSLVALNTLCVAIVHYNQPEWLSDFLYYAEFIFLGLFMSEMFIKMYGLGTRPYFHSSFNCFDCGVIIGSIFEVIWAVIKPGTSFGISVLRALRLLRIFKVTKYWASLRNLVVSLLNSMKSIISLLFLLFLFIVVFALLGMQLFGGQFNFDEGTPPTNFDTFPAAIMTVFQILTGEDWNEVMYDGIKSQGGVQGGMVFSIYFIVLTLFGNYTLLNVFLAIAVDNLANAQELTKDEQEEEEAANQKLALQKAKEVAEVSPLSAANMSIAVKEQQKNQKPAKSVWEQRTSEMRKQNLLASREALYNEMDPDERWKAAYTRHLRPDMKTHLDRPLVVDPQENRNNNTNKSRAAEPTVDQRLGQQRAEDFLRKQARYHDRARDPSGSAGLDARRPWAGSQEAELSREGPYGRESDHHAREGSLEQPGFWEGEAERGKAGDPHRRHVHRQGGSRESRSGSPRTGADGEHRRHRAHRRPGEEGPEDKAERRARHREGSRPARGGEGEGEGPDGGERRRRHRHGAPATYEGDARREDKERRHRRRKENQGSGVPVSGPNLSTTRPIQQDLGRQDPPLAEDIDNMKNNKLATAESAAPHGSLGHAGLPQSPAKMGNSTDPGPMLAIPAMATNPQNAASRRTPNNPGNPSNPGPPKTPENSLIVTNPSGTQTNSAKTARKPDHTTVDIPPACPPPLNHTVVQVNKNANPDPLPKKEEEKKEEEEDDRGEDGPKPMPPYSSMFILSTTNPLRRLCHYILNLRYFEMCILMVIAMSSIALAAEDPVQPNAPRNNVLRYFDYVFTGVFTFEMVIKMIDLGLVLHQGAYFRDLWNILDFIVVSGALVAFAFTGNSKGKDINTIKSLRVLRVLRPLKTIKRLPKLKAVFDCVVNSLKNVFNILIVYMLFMFIFAVVAVQLFKGKFFHCTDESKEFEKDCRGKYLLYEKNEVKARDREWKKYEFHYDNVLWALLTLFTVSTGEGWPQVLKHSVDATFENQGPSPGYRMEMSIFYVVYFVVFPFFFVNIFVALIIITFQEQGDKMMEEYSLEKNERACIDFAISAKPLTRHMPQNKQSFQYRMWQFVVSPPFEYTIMAMIALNTIVLMMKFYGASVAYENALRVFNIVFTSLFSLECVLKVMAFGILNYFRDAWNIFDFVTVLGSITDILVTEFGNNFINLSFLRLFRAARLIKLLRQGYTIRILLWTFVQSFKALPYVCLLIAMLFFIYAIIGMQVFGNIGIDVEDEDSDEDEFQITEHNNFRTFFQALMLLFRSATGEAWHNIMLSCLSGKPCDKNSGILTRECGNEFAYFYFVSFIFLCSFLMLNLFVAVIMDNFEYLTRDSSILGPHHLDEYVRVWAEYDPAAWGRMPYLDMYQMLRHMSPPLGLGKKCPARVAYKRLLRMDLPVADDNTVHFNSTLMALIRTALDIKIAKGGADKQQMDAELRKEMMAIWPNLSQKTLDLLVTPHKSTDLTVGKIYAAMMIMEYYRQSKAKKLQAMREEQDRTPLMFQRMEPPSPTQEGGPGQNALPSTQLDPGGALMAHESGLKESPSWVTQRAQEMFQKTGTWSPEQGPPTDMPNSQPNSQSVEMREMGRDGYSDSEHYLPMEGQGRAASMPRLPAENQRRRGRPRGNNLSTISDTSPMKRSASVLGPKARRLDDYSLERVPPEENQRHHQRRRDRSHRASERSLGRYTDVDTGLGTDLSMTTQSGDLPSKERDQERGRPKDRKHRQHHHHHHHHHHPPPPDKDRYAQERPDHGRARARDQRWSRSPSEGREHMAHRQGSSSVSGSPAPSTSGTSTPRRGRRQLPQTPSTPRPHVSYSPVIRKAGGSGPPQQQQQQQQQQQQQAVARPGRAATSGPRRYPGPTAEPLAGDRPPTGGHSSGRSPRMERRVPGPARSESPRACRHGGARWPASGPHVSEGPPGPRHHGYYRGSDYDEADGPGSGGGEEAMAGAYDAPPPVRHASSGATGRSPRTPRASGPACASPSRHGRRLPNGYYPAHGLARPRGPGSRKGLHEPYSESDDDWCKVPVFTLEDFVGDWRQTAGYNLDQVLEQGGVSSLFQNLGVSVTPIQRIVLSGENGLKIDIHVIIPYEGLSGDQMGQIEKIFKVVYPVDDHHFKVILHYGTLVIDGVTPNMIDYFGRPYEGIAVFDGKKITVTGTLWNGNKIIDERLINPDGSLLFRVTINGVTGWRLCERILAGGGGSPSRLEEELRRRLTEP

SEQ ID NO: 433 - protein, 666 aa, Artificial Sequence
  Description of Artificial Sequence: Synthetic polypeptide
MWGLAGGRLFGIFSAPVLVAVVCCAQSVNDPGNMSFVKETVDKLLKGYDIRLRPDFGGPPVCVGMNIDIASIDMVSEVNMDYTLTMYFQQYWRDKRLAYSGIPLNLTLDNRVADQLWVPDTYFLNDKKSFVHGVTVKNRMIRLHPDGTVLYGLRITTTAACMMDLRRYPLDEQNCTLEIESYGYTTDDIEFYWRGGDKAVTGVERIELPQFSIVEHRLVSRNVVFATGAYPRLSLSFRLKRNIGYFILQTYMPSILITILSWVSFWINYDASAARVALGITTVLTMTTINTHLRETLPKIPYVKAIDMYLMGCFVFVFLALLEYAFVNYIFFGRGPQRQKKLAEKTAKAKNDRSKSESNRVDAHGNILLTSLEVHNEMNEVSGGIGDTRNSAISFDNSGIQYRKQSMPREGHGRFLGDRSLPHKKTHLRRRSSQLKIKIPDLTDVNAIDRWSRIVFPFTFSLFNLVYWLYYVNKVPVFTLEDFVGDWRQTAGYNLDQVLEQGGVSSLFQNLGVSVTPIQRIVLSGENGLKIDIHVIIPYEGLSGDQMGQIEKIFKVVYPVDDHHFKVILHYGTLVIDGVTPNMIDYFGRPYEGIAVFDGKKITVTGTLWNGNKIIDERLINPDGSLLFRVTINGVTGWRLCERILAGGGGSPSRLEEELRRRLTEP

SEQ ID NO: 434 - protein, 792 aa, Artificial Sequence
  Description of Artificial Sequence: Synthetic polypeptide
MATNGSKVADGQISTEVSEAPVANDKPKTLVVKVQKKAADLPDRDTWKGRFDFLMSCVGYAIGLGNVWRFPYLCGKNGGGAFLIPYFLTLIFAGVPLFLLECSLGQYTSIGGLGVWKLAPMFKGVGLAAAVLSFWLNIYYIVIISWAIYYLYNSFTTTLPWKQCDNPWNTDRCFSNYSMVNTTNMTSAVVEFWERNMHQMTDGLDKPGQIRWPLAITLAIAWILVYFCIWKGVGWTGKVVYFSATYPYIMLIILFFRGVTLPGAKEGILFYITPNFRKLSDSEVWLDAATQIFFSYGLGLGSLIALGSYNSFHNNVYRDSIIVCCINSCTSMFAGFVIFSIVGFMAHVTKRSIADVAASGPGLAFLAYPEAVTQLPISPLWAILFFSMLLMLGIDSQFCTVEGFITALVDEYPRLLRNRRELFIAAVCIISYLIGLSNITQGGIYVFKLFDYYSASGMSLLFLVFFECVSISWFYGVNRFYDNIQEMVGSRPCIWWKLCWSFFTPIIVAGVFIFSAVQMTPLTMGNYVFPKWGQGVGWLMALSSMVLIPGYMAYMFLTLKGSLKQRIQVMVQPSEDIVRPENGPEQPQAGSSTSKEAYIKVPVFTLEDFVGDWRQTAGYNLDQVLEQGGVSSLFQNLGVSVTPIQRIVLSGENGLKIDIHVIIPYEGLSGDQMGQIEKIFKVVYPVDDHHFKVILHYGTLVIDGVTPNMIDYFGRPYEGIAVFDGKKITVTGTLWNGNKIIDERLINPDGSLLFRVTINGVTGWRLCERILAGGGGSPSRLEEELRRRLTEP

SEQ ID NO: 435 - protein, 1065 aa, Artificial Sequence
  Description of Artificial Sequence: Synthetic polypeptide
MVQKSRNGGVYPGPSGEKKLKVGFVGLDPGAPDSTRDGALLIAGSEAPKRGSILSKPRAGGAGAGKPPKRNAFYRKLQNFLYNVLERPRGWAFIYHAYVFLLVFSCLVLSVFSTIKEYEKSSEGALYILEIVTIVVFGVEYFVRIWAAGCCCRYRGWRGRLKFARKPFCVIDIMVLIASIAVLAAGSQGNVFATSALRSLRFLQILRMIRMDRRGGTWKLLGSVVYAHSKELVTAWYIGFLCLILASFLVYLAEKGENDHFDTYADALWWGLITLTTIGYGDKYPQTWNGRLLAATFTLIGVSFFALPAGILGSGFALKVQEQHRQKHFEKRRNPAAGLIQSAWRFYATNLSRTDLHSTWQYYERTVTVPMYSSQTQTYGASRLIPPLNQLELLRNLKSKSGLAFRKDPPPEPSPSKGSPCRGPLCGCCPGRSSQKVSLKDRVFSSPRGVAAKGKGSPQAQTVRRSPSADQSLEDSPSKVPKSWSFGDRSRARQAFRIKGAASRQNSEEASLPGEDIVDDKSCPCEFVTEDLTPGLKVSIRAVCVMRFLVSKRKFKESLRPYDVMDVIEQYSAGHLDMLSRIKSLQSRVDQIVGRGPAITDKDRTKGPAEAELPEDPSMMGRLGKVEKQVLSMEKKLDFLVNIYMQRMGIPPTETEAYFGAKEPEPAPPYHSPEDSREHVDRHGCIVKIVRSSSSTGQKNFSAPPAAPPVQCPPSTSWQPQSHPRQGHGTSPVGDHGSLVRIPPPPAHERSLSAYGGGNRASMEFLRQEDTPGCRPPEGNLRDSDTSISIPSVDHEELERSFSGFSISQSKENLDALNSCYAAVAPCAKVRPYIAEGESDTDSDLCTPCGPPPRSATGEGPFGDVGWAGPRKKVPVFTLEDFVGDWRQTAGYNLDQVLEQGGVSSLFQNLGVSVTPIQRIVLSGENGLKIDIHVIIPYEGLSGDQMGQIEKIFKVVYPVDDHHFKVILHYGTLVIDGVTPNMIDYFGRPYEGIAVFDGKKITVTGTLWNGNKIIDERLINPDGSLLFRVTINGVTGWRLCERILAGGGGSPSRLEEELRRRLTEP

SEQ ID NO: 436 - protein, 2173 aa, Artificial Sequence
  Description of Artificial Sequence: Synthetic polypeptide
MAARLLAPPGPDSFKPFTPESLANIERRIAESKLKKPPKADGSHREDDEDSKPKPNSDLEAGKSLPFIYGDIPQGLVAVPLEDFDPYYLTQKTFVVLNRGKTLFRFSATPALYILSPFNLIRRIAIKILIHSVFSMIIMCTILTNCVFMTFSNPPDWSKNVEYTFTGIYTFESLVKIIARGFCIDGFTFLRDPWNWLDFSVIMMAYITEFVNLGNVSALRTFRVLRALKTISVIPGLKTIVGALIQSVKKLSDVMILTVFCLSVFALIGLQLFMGNLRNKCVVWPINFNESYLENGTKGFDWEEYINNKTNFYTVPGMLEPLLCGNSSDAGQCPEGYQCMKAGRNPNYGYTSFDTFSWAFLALFRLMTQDYWENLYQLTLRAAGKTYMIFFVLVIFVGSFYLVNLILAVVAMAYEEQNQATLEEAEQKEAEFKAMLEQLKKQQEEAQAAAMATSAGTVSEDAIEEEGEEGGGSPRSSSEISKLSSKSAKERRNRRKKRKQKELSEGEEKGDPEKVFKSESEDGMRRKAFRLPDNRIGRKFSIMNQSLLSIPGSPFLSRHNSKSSIFSFRGPGRFRDPGSENEFADDEHSTVEESEGRRDSLFIPIRARERRSSYSGYSGYSQGSRSSRIFPSLRRSVKRNSTVDCNGVVSLIGGPGSHIGGRLLPEATTEVEIKKKGPGSLLVSMDQLASYGRKDRINSIMSVVTNTLVEELEESQRKCPPCWYKFANTFLIWECHPYWIKLKEIVNLIVMDPFVDLAITICIVLNTLFMAMEHHPMTPQFEHVLAVGNLVFTGIFTAEMFLKLIAMDPYYYFQEGWNIFDGFIVSLSLMELSLADVEGLSVLRSFRLLRVFKLAKSWPTLNMLIKIIGNSVGALGNLTLVLAIIVFIFAVVGMQLFGKSYKECVCKINQDCELPRWHMHDFFHSFLIVFRVLCGEWIETMWDCMEVAGQAMCLIVFMMVMVIGNLVVLNLFLALLLSSFSADNLAATDDDGEMNNLQISVIRIKKGVAWTKLKVHAFMQAHFKQREADEVKPLDELYEKKANCIANHTGADIHRNGDFQKNGNGTTSGIGSSVEKYIIDEDHMSFINNPNLTVRVPIAVGESDFENLNTEDVSSESDPEGSKDKLDDTSSSEGSTIDIKPEVEEVPVEQPEEYLDPDACFTEGCVQRFKCCQVNIEEGLGKSWWILRKTCFLIVEHNWFETFIIFMILLSSGALAFEDIYIEQRKTIRTILEYADKVFTYIFILEMLLKWTAYGFVKFFTNAWCWLDFLIVAVSLVSLIANALGYSELGAIKSLRTLRALRPLRALSRFEGMRVVVNALVGAIPSIMNVLLVCLIFWLIFSIMGVNLFAGKYHYCFNETSEIRFEIEDVNNKTECEKLMEGNNTEIRWKNVKINFDNVGAGYLALLQVATFKGWMDIMYAAVDSRKPDEQPKYEDNIYMYIYFVIFIIFGSFFTLNLFIGVIIDNFNQQKKKFGGQDIFMTEEQKKYYNAMKKLGSKKPQKPIPRPLNKIQGIVFDFVTQQAFDIVIMMLICLNMVTMMVETDTQSKQMENILYWINLVFVIFFTCECVLKMFALRHYYFTIGWNIFDFVVVILSIVGMFLADIIEKYFVSPTLFRVIRLARIGRILRLIKGAKGIRTLLFALMMSLPALFNIGLLLFLVMFIFSIFGMSNFAYVKHEAGIDDMFNFETFGNSMICLFQITTSAGWDGLLLPILNRPPDCSLDKEHPGSGFKGDCGNPSVGIFFFVSYIIISFLIVVNMYIAIILENFSVATEESADPLSEDDFETFYEIWEKFDPDATQFIEYCKLADFADALEHPLRVPKPNTIELIAMDLPMVSGDRIHCLDILFAFTKRVLGDSGELDILRQQMEERFVASNPSKVSYEPITTTLRRKQEEVSAVVLQRAYRGHLARRGFICKKTTSNKLENGGTHREKKESTPSTASLPSYDSVTKPEKEKQQRAEEGRRERAKRQKEVRESKCKVPVFTLEDFVGDWRQTAGYNLDQVLEQGGVSSLFQNLGVSVTPIQRIVLSGENGLKIDIHVIIPYEGLSGDQMGQIEKIFKVVYPVDDHHFKVILHYGTLVIDGVTPNMIDYFGRPYEGIAVFDGKKITVTGTLWNGNKIIDERLINPDGSLLFRVTINGVTGWRLCERILAGGGGSPSRLEEELRRRLTEP

SEQ ID NO: 437 - protein, 2198 aa, Artificial Sequence
  Description of Artificial Sequence: Synthetic polypeptide
MAQSVLVPPGPDSFRFFTRESLAAIEQRIAEEKAKRPKQERKDEDDENGPKPNSDLEAGKSLPFIYGDIPPEMVSVPLEDLDPYYINKKTFIVLNKGKAISRFSATPALYILTPFNPIRKLAIKILVHSLFNMLIMCTILTNCVFMTMSNPPDWTKNVEYTFTGIYTFESLIKILARGFCLEDFTFLRDPWNWLDFTVITFAYVTEFVDLGNVSALRTFRVLRALKTISVIPGLKTIVGALIQSVKKLSDVMILTVFCLSVFALIGLQLFMGNLRNKCLQWPPDNSSFEINITSFFNNSLDGNGTTFNRTVSIFNWDEYIEDKSHFYFLEGQNDALLCGNSSDAGQCPEGYICVKAGRNPNYGYTSFDTFSWAFLSLFRLMTQDFWENLYQLTLRAAGKTYMIFFVLVIFLGSFYLINLILAVVAMAYEEQNQATLEEAEQKEAEFQQMLEQLKKQQEEAQAAAAAASAESRDFSGAGGIGVFSESSSVASKLSSKSEKELKNRRKKKKQKEQSGEEEKNDRVRKSESEDSIRRKGFRFSLEGSRLTYEKRFSSPHQSLLSIRGSLFSPRRNSRASLFSFRGRAKDIGSENDFADDEHSTFEDNDSRRDSLFVPHRHGERRHSNVSQASRASRVLPILPMNGKMHSAVDCNGVVSLVGGPSTLTSAGQLLPEGTTTETEIRKRRSSSYHVSMDLLEDPTSRQRAMSIASILTNTMEELEESRQKCPPCWYKFANMCLIWDCCKPWLKVKHLVNLVVMDPFVDLAITICIVLNTLFMAMEHYPMTEQFSSVLSVGNLVFTGIFTAEMFLKIIAMDPYYYFQEGWNIFDGFIVSLSLMELGLANVEGLSVLRSFRLLRVFKLAKSWPTLNMLIKIIGNSVGALGNLTLVLAIIVFIFAVVGMQLFGKSYKECVCKISNDCELPRWHMHDFFHSFLIVFRVLCGEWIETMWDCMEVAGQTMCLTVFMMVMVIGNLVVLNLFLALLLSSFSSDNLAATDDDNEMNNLQIAVGRMQKGIDFVKRKIREFIQKAFVRKQKALDEIKPLEDLNNKKDSCISNHTTIEIGKDLNYLKDGNGTTSGIGSSVEKYVVDESDYMSFINNPSLTVTVPIAVGESDFENLNTEEFSSESDMEESKEKLNATSSSEGSTVDIGAPAEGEQPEVEPEESLEPEACFTEDCVRKFKCCQISIEEGKGKLWWNLRKTCYKIVEHNWFETFIVFMILLSSGALAFEDIYIEQRKTIKTMLEYADKVFTYIFILEMLLKWVAYGFQVYFTNAWCWLDFLIVDVSLVSLTANALGYSELGAIKSLRTLRALRPLRALSRFEGMRVVVNALLGAIPSIMNVLLVCLIFWLIFSIMGVNLFAGKFYHCINYTTGEMFDVSVVNNYSECKALIESNQTARWKNVKVNFDNVGLGYLSLLQVATFKGWMDIMYAAVDSRNVELQPKYEDNLYMYLYFVIFIIFGSFFTLNLFIGVIIDNFNQQKKKFGGQDIFMTEEQKKYYNAMKKLGSKKPQKPIPRPANKFQGMVFDFVTKQVFDISIMILICLNMVTMMVETDDQSQEMTNILYWINLVFIVLFTGECVLKLISLRYYYFTIGWNIFDFVVVILSIVGMFLAELIEKYFVSPTLFRVIRLARIGRILRLIKGAKGIRTLLFALMMSLPALFNIGLLLFLVMFIYAIFGMSNFAYVKREVGIDDMFNFETFGNSMICLFQITTSAGWDGLLAPILNSGPPDCDPDKDHPGSSVKGDCGNPSVGIFFFVSYIIISFLVVVNMYIAVILENFSVATEESAEPLSEDDFEMFYEVWEKFDPDATQFIEFAKLSDFADALDPPLLIAKPNKVQLIAMDLPMVSGDRIHCLDILFAFTKRVLGESGEMDALRIQMEERFMASNPSKVSYEPITTTLKRKQEEVSAIIIQRAYRRYLLKQKVKKVSSIYKKDKGKECDGTPIKEDTLIDKLNENSTPEKTDMTPSTTSPPSYDSVTKPEKEKFEKDKSEKEDKGKDIRESKKKVPVFTLEDFVGDWRQTAGYNLDQVLEQGGVSSLFQNLGVSVTPIQRIVLSGENGLKIDIHVIIPYEGLSGDQMGQIEKIFKVVYPVDDHHFKVILHYGTLVIDGVTPNMIDYFGRPYEGIAVFDGKKITVTGTLWNGNKIIDERLINPDGSLLFRVTINGVTGWRLCERILAGGGGSPSRLEEELRRRLTEP

SEQ ID NO: 438 - protein, 2202 aa, Artificial Sequence
  Description of Artificial Sequence: Synthetic polypeptide
MEQTVLVPPGPDSFNFFTRESLAAIERRIAEEKAKNPKPDKKDDDENGPKPNSDLEAGKNLPFIYGDIPPEMVSEPLEDLDPYYINKKTFIVLNKGKAIFRFSATSALYILTPFNPLRKIAIKILVHSLFSMLIMCTILTNCVFMTMSNPPDWTKNVEYTFTGIYTFESLIKIIARGFCLEDFTFLRDPWNWLDFTVITFAYVTEFVDLGNVSALRTFRVLRALKTISVIPGLKTIVGALIQSVKKLSDVMILTVFCLSVFALIGLQLFMGNLRNKCIQWPPTNASLEEHSIEKNITVNYNGTLINETVFEFDWKSYIQDSRYHYFLEGFLDALLCGNSSDAGQCPEGYMCVKAGRNPNYGYTSFDTFSWAFLSLFRLMTQDFWENLYQLTLRAAGKTYMIFFVLVIFLGSFYLINLILAVVAMAYEEQNQATLEEAEQKEAEFQQMIEQLKKQQEAAQQAATATASEHSREPSAAGRLSDSSSEASKLSSKSAKERRNRRKKRKQKEQSGGEEKDEDEFQKSESEDSIRRKGFRFSIEGNRLTYEKRYSSPHQSLLSIRGSLFSPRRNSRTSLFSFRGRAKDVGSENDFADDEHSTFEDNESRRDSLFVPRRHGERRNSNLSQTSRSSRMLAVFPANGKMHSTVDCNGVVSLVGGPSVPTSPVGQLLPEVIIDKPATDDNGTTTETEMRKRRSSSFHVSMDFLEDPSQRQRAMSIASILTNTVEELEESRQKCPPCWYKFSNIFLIWDCSPYWLKVKHVVNLVVMDPFVDLAITICIVLNTLFMAMEHYPMTDHFNNVLTVGNLVFTGIFTAEMFLKIIAMDPYYYFQEGWNIFDGFIVTLSLVELGLANVEGLSVLRSFRLLRVFKLAKSWPTLNMLIKIIGNSVGALGNLTLVLAIIVFIFAVVGMQLFGKSYKDCVCKIASDCQLPRWHMNDFFHSFLIVFRVLCGEWIETMWDCMEVAGQAMCLTVFMMVMVIGNLVVLNLFLALLLSSFSADNLAATDDDNEMNNLQIAVDRMHKGVAYVKRKIYEFIQQSFIRKQKILDEIKPLDDLNNKKDSCMSNHTAEIGKDLDYLKDVNGTTSGIGTGSSVEKYIIDESDYMSFINNPSLTVTVPIAVGESDFENLNTEDFSSESDLEESKEKLNESSSSSEGSTVDIGAPVEEQPVVEPEETLEPEACFTEGCVQRFKCCQINVEEGRGKQWWNLRRTCFRIVEHNWFETFIVFMILLSSGALAFEDIYIDQRKTIKTMLEYADKVFTYIFILEMLLKWVAYGYQTYFTNAWCWLDFLIVDVSLVSLTANALGYSELGAIKSLRTLRALRPLRALSRFEGMRVVVNALLGAIPSIMNVLLVCLIFWLIFSIMGVNLFAGKFYHCINTTTGDRFDIEDVNNHTDCLKLIERNETARWKNVKVNFDNVGFGYLSLLQVATFKGWMDIMYAAVDSRNVELQPKYEESLYMYLYFVIFIIFGSFFTLNLFIGVIIDNFNQQKKKFGGQDIFMTEEQKKYYNAMKKLGSKKPQKPIPRPGNKFQGMVFDFVTRQVFDISIMILICLNMVTMMVETDDQSEYVTTILSRINLVFIVLFTGECVLKLISLRHYYFTIGWNIFDFVVVILSIVGMFLAELIEKYFVSPTLFRVIRLARIGRILRLIKGAKGIRTLLFALMMSLPALFNIGLLLFLVMFIYAIFGMSNFAYVKREVGIDDMFNFETFGNSMICLFQITTSAGWDGLLAPILNSKPPDCDPNKVNPGSSVKGDCGNPSVGIFFFVSYIIISFLVVVNMYIAVILENFSVATEESAEPLSEDDFEMFYEVWEKFDPDATQFMEFEKLSQFAAALEPPLNLPQPNKLQLIAMDLPMVSGDRIHCLDILFAFTKRVLGESGEMDALRIQMEERFMASNPSKVSYQPITTTLKRKQEEVSAVIIQRAYRRHLLKRTVKQASFTYNKNKIKGGANLLIKEDMIIDRINENSITEKTDLTMSTAACPPSYDRVTKPIVEKHEQEGKDEKAKGKKVPVFTLEDFVGDWRQTAGYNLDQVLEQGGVSSLFQNLGVSVTPIQRIVLSGENGLKIDIHVIIPYEGLSGDQMGQIEKIFKVVYPVDDHHFKVILHYGTLVIDGVTPNMIDYFGRPYEGIAVFDGKKITVTGTLWNGNKIIDERLINPDGSLLFRVTINGVTGWRLCERILAGGGGSPSRLEEELRRRLTEP

SEQ ID NO: 439 - protein, 1677 aa, Artificial Sequence
  Description of Artificial Sequence: Synthetic polypeptide
MKPRAECCSPKFWLVLAVLAVSGSRARSQKSPPSIGIAVILVGTSDEVAIKDAHEKDDFHHLSVVPRVELVAMNETDPKSIITRICDLMSDRKIQGVVFADDTDQEAIAQILDFISAQTLTPILGIHGGSSMIMADKDESSMFFQFGPSIEQQASVMLNIMEEYDWYIFSIVTTYFPGYQDFVNKIRSTIENSFVGWELEEVLLLDMSLDDGDSKIQNQLKKLQSPIILLYCTKEEATYIFEVANSVGLTGYGYTWIVPSLVAGDTDTVPAEFPTGLISVSYDEWDYGLPARVRDGIAIITTAASDMLSEHSFIPEPKSSCYNTHEKRIYQSNMLNRYLINVTFEGRNLSFSEDGYQMHPKLVIILLNKERKWERVGKWKDKSLQMKYYVWPRMCPETEEQEDDHLSIVTLEEAPFVIVESVDPLSGTCMRNTVPCQKRIVTENKTDEEPGYIKKCCKGFCIDILKKISKSVKFTYDLYLVTNGKHGKKINGTWNGMIGEVVMKRAYMAVGSLTINEERSEVVDFSVPFIETGISVMVSRSNGTVSPSAFLEPFSADVWVMMFVMLLIVSAVAVFVFEYFSPVGYNRCLADGREPGGPSFTIGKAIWLLWGLVFNNSVPVQNPKGTTSKIMVSVWAFFAVIFLASYTANLAAFMIQEEYVDQVSGLSDKKFQRPNDFSPPFRFGTVPNGSTERNIRNNYAEMHAYMGKFNQRGVDDALLSLKTGKLDAFIYDAAVLNYMAGRDEGCKLVTIGSGKVFASTGYGIAIQKDSGWKRQVDLAILQLFGDGEMEELEALWLTGICHNEKNEVMSSQLDIDNMAGVFYMLGAAMALSLITFICEHLFYWQFRHCFMGVCSGKPGMVFSISRGIYSCIHGVAIEERQSVMNSPTATMNNTHSNILRLLRTAKNMANLSGVNGSPQSALDFIRRESSVYDISEHRRSFTHSDCKSYNNPPCEENLFSDYISEVERTFGNLQLKDSNVYQDHYHHHHRPHSIGSASSIDGLYDCDNPPFTTQSRSISKKPLDIGLPSSKHSQLSDLYGKFSFKSDRYSGHDDLIRSDVSDISTHTVTYGNIEGNAAKRRKQQYKDSLKKRPASAKSRREFDEIELAYRRRPPRSPDHKRYFRDKEGLRDFYLDQFRTKENSPHWEHVDLTDIYKERSDDFKRDSVSGGGPCTNRSHIKHGTGDKHGVVSGVPAPWEKNLTNVEWEDRSGGNFCRSCPSKLHNYSTTVTGQNSGRQACIRCEACKKAGNLYDISEDNSLQELDQPAAPVAVTSNASTTKYPQSPTNSKAQKKNRNKLRRQHSYDTFVDLQKEEAALAPRSVSLKDKGRFMDGSPYAHMFEMSAGESTFANNKSSVPTAGHHHHNNPGGGYMLSKSLYPDRVTQNPFIPTFGDDQCLLHGSKSYFFRQPTVAGASKARPDFRALVTNKPVVSALHGAVPARFQKDICIGNQSNPCVPNNKNPRAFNGSSNGHVYEKLSSIESDVKVPVFTLEDFVGDWRQTAGYNLDQVLEQGGVSSLFQNLGVSVTPIQRIVLSGENGLKIDIHVIIPYEGLSGDQMGQIEKIFKVVYPVDDHHFKVILHYGTLVIDGVTPNMIDYFGRPYEGIAVFDGKKITVTGTLWNGNKIIDERLINPDGSLLFRVTINGVTGWRLCERILAGGGGSPSRLEEELRRRLTEP

SEQ ID NO: 440 - protein, 246 aa, Artificial Sequence
  Description of Artificial Sequence: Synthetic polypeptide
MEAGGFLDSLIYGACVVFTLGMFSAGLSDLRHMRMTRSVDNVQFLPFLTTEVKKVPVFTLEDFVGDWRQTAGYNLDQVLEQGGVSSLFQNLGVSVTPIQRIVLSGENGLKIDIHVIIPYEGLSGDQMGQIEKIFKVVYPVDDHHFKVILHYGTLVIDGVTPNMIDYFGRPYEGIAVFDGKKITVTGTLWNGNKIIDERLINPDGSLLFRVTINGVTGWRLCERILAGGGGSPSRLEEELRRRLTEP

SEQ ID NO: 441 - protein, 242 aa, Artificial Sequence
  Description of Artificial Sequence: Synthetic polypeptide
MELEAMSRYTSPVNPAVFPHLTVVLLAIGMFFTAWFFVYPFTEQPEDQHKVPVFTLEDFVGDWRQTAGYNLDQVLEQGGVSSLFQNLGVSVTPIQRIVLSGENGLKIDIHVIIPYEGLSGDQMGQIEKIFKVVYPVDDHHFKVILHYGTLVIDGVTPNMIDYFGRPYEGIAVFDGKKITVTGTLWNGNKIIDERLINPDGSLLFRVTINGVTGWRLCERILAGGGGSPSRLEEELRRRLTEP

SEQ ID NO: 442 - protein, 244 aa, Artificial Sequence
  Description of Artificial Sequence: Synthetic polypeptide
MALLLVSLLAFLSLGSGCHHRICHCSNRVFLCQESKVTEIPSDLPRNAIELKVPVFTLEDFVGDWRQTAGYNLDQVLEQGGVSSLFQNLGVSVTPIQRIVLSGENGLKIDIHVIIPYEGLSGDQMGQIEKIFKVVYPVDDHHFKVILHYGTLVIDGVTPNMIDYFGRPYEGIAVFDGKKITVTGTLWNGNKIIDERLINPDGSLLFRVTINGVTGWRLCERILAGGGGSPSRLEEELRRRLTEP

SEQ ID NO: 443 - protein, 706 aa, Artificial Sequence
  Description of Artificial Sequence: Synthetic polypeptide
MEDAKNIKKGPAPFYPLEDGTAGEQLHKAMKRYALVPGTIAFTDAHIEVDITYAEYFEMSVRLAEAMKRYGLNTNHRIVVCSENSLQFFMPVLGALFIGVAVAPANDIYNERELLNSMGISQPTVVFVSKKGLQKILNVQKKLPIIQKIIIMDSKTDYQGFQSMYTFVTSHLPPGFNEYDFVPESFDRDKTIALIMNSSGSTGLPKGVALPHRTACVRFSHARDPIFGNQIIPDTAILSVVPFHHGFGMFTTLGYLICGFRVVLMYRFEEELFLRSLQDYKIQSALLVPTLFSFFAKSTLIDKYDLSNLHEIASGGAPLSKEVGEAVAKRFHLPGIRQGYGLTETTSAILITPEGDDKPGAVGKVVPFFEAKVVDLDTGKTLGVNQRGELCVRGPMIMSGYVNNPEATNALIDKDGWLHSGDIAYWDEDEHFFIVDRLKSLIKYKGYQVAPAELESILLQHPNIFDAGVAGLPDDDAGELPAAVVVLEHGKTMTEKEIVDYVASQVTTAKKLRGGVVFVDEVPKGLTGKLDARKIREILIKAKKGGKIAVTRLKGSGATNFSLLKQAGDVEENPGPRSGTGSSGEVQLQESGGGLVQPGGSLRLSCTASGVTISALNAMAMGWYRQAPGERRVMVAAVSERGNAMYRESVQGRFTVTRDFTNKMVSLQMDNLKPEDTAVYYCHVLEDRVDSFHDYWGQGTQVTVSS

SEQ ID NO: 444 - protein, 976 aa, Artificial Sequence
  Description of Artificial Sequence: Synthetic polypeptide
MEDAKNIKKGPAPFYPLEDGTAGEQLHKAMKRYALVPGTIAFTDAHIEVDITYAEYFEMSVRLAEAMKRYGLNTNHRIVVCSENSLQFFMPVLGALFIGVAVAPANDIYNERELLNSMGISQPTVVFVSKKGLQKILNVQKKLPIIQKIIIMDSKTDYQGFQSMYTFVTSHLPPGFNEYDFVPESFDRDKTIALIMNSSGSTGLPKGVALPHRTACVRFSHARDPIFGNQIIPDTAILSVVPFHHGFGMFTTLGYLICGFRVVLMYRFEEELFLRSLQDYKIQSALLVPTLFSFFAKSTLIDKYDLSNLHEIASGGAPLSKEVGEAVAKRFHLPGIRQGYGLTETTSAILITPEGDDKPGAVGKVVPFFEAKVVDLDTGKTLGVNQRGELCVRGPMIMSGYVNNPEATNALIDKDGWLHSGDIAYWDEDEHFFIVDRLKSLIKYKGYQVAPAELESILLQHPNIFDAGVAGLPDDDAGELPAAVVVLEHGKTMTEKEIVDYVASQVTTAKKLRGGVVFVDEVPKGLTGKLDARKIREILIKAKKGGKIAVTRLKGSGATNFSLLKQAGDVEENPGPRSGTGSPPSFSEGSGGSRTPEKGFSDREPTRPPRPILQRQDDIVQEKRLSRGISHASSSIVSLARSHVSSNGGGGGSNEHPLEMPICAFQLPDLTVYNEDFRSFIERDLIEQSMLVALEQAGRLNWWVSVDPTSQRLLPLATTGDGNCLLHAASLGMWGFHDRDLMLRKALYALMEKGVEKEALKRRWRWQQTQQNKESGLVYTEDEWQKEWNELIKLASSEPRMHLGTNGANCGGVESSEEPVYESLEEFHVFVLAHVLRRPIVVVADTMLRDSGGEAFAPIPFGGIYLPLEVPASQCHRSPLVLAYDQAHFSALVSMEQKENTKEQAVIPLTDSEYKLLPLHFAVDPGKGWEWGKDDSDNVRLASVILSLEVKLHLLHSYMNVKWIPLSSDAQAPLAQ

SEQ ID NO: 445 - protein, 1106 aa, Artificial Sequence
  Description of Artificial Sequence: Synthetic polypeptide
MEDAKNIKKGPAPFYPLEDGTAGEQLHKAMKRYALVPGTIAFTDAHIEVDITYAEYFEMSVRLAEAMKRYGLNTNHRIVVCSENSLQFFMPVLGALFIGVAVAPANDIYNERELLNSMGISQPTVVFVSKKGLQKILNVQKKLPIIQKIIIMDSKTDYQGFQSMYTFVTSHLPPGFNEYDFVPESFDRDKTIALIMNSSGSTGLPKGVALPHRTACVRFSHARDPIFGNQIIPDTAILSVVPFHHGFGMFTTLGYLICGFRVVLMYRFEEELFLRSLQDYKIQSALLVPTLFSFFAKSTLIDKYDLSNLHEIASGGAPLSKEVGEAVAKRFHLPGIRQGYGLTETTSAILITPEGDDKPGAVGKVVPFFEAKVVDLDTGKTLGVNQRGELCVRGPMIMSGYVNNPEATNALIDKDGWLHSGDIAYWDEDEHFFIVDRLKSLIKYKGYQVAPAELESILLQHPNIFDAGVAGLPDDDAGELPAAVVVLEHGKTMTEKEIVDYVASQVTTAKKLRGGVVFVDEVPKGLTGKLDARKIREILIKAKKGGKIAVTRLKGSGATNFSLLKQAGDVEENPGPRSGTGSSGEVQLQESGGGLVQPGGSLRLSCTASGVTISALNAMAMGWYRQAPGERRVMVAAVSERGNAMYRESVQGRFTVTRDFTNKMVSLQMDNLKPEDTAVYYCHVLEDRVDSFHDYWGQGTQVTVSSGAPGSGPPSFSEGSGGSRTPEKGFSDREPTRPPRPILQRQDDIVQEKRLSRGISHASSSIVSLARSHVSSNGGGGGSNEHPLEMPICAFQLPDLTVYNEDFRSFIERDLIEQSMLVALEQAGRLNWWVSVDPTSQRLLPLATTGDGNCLLHAASLGMWGFHDRDLMLRKALYALMEKGVEKEALKRRWRWQQTQQNKESGLVYTEDEWQKEWNELIKLASSEPRMHLGTNGANCGGVESSEEPVYESLEEFHVFVLAHVLRRPIVVVADTMLRDSGGEAFAPIPFGGIYLPLEVPASQCHRSPLVLAYDQAHFSALVSMEQKENTKEQAVIPLTDSEYKLLPLHFAVDPGKGWEWGKDDSDNVRLASVILSLEVKLHLLHSYMNVKWIPLSSDAQAPLAQ

SEQ ID NO: 446 - protein, 882 aa, Artificial Sequence
  Description of Artificial Sequence: Synthetic polypeptide
MAAASSPPRAERKRWGWGRLPGARRGSAGLAKKCPFSLELAEGGPAGGALYAPIAPGAPGPAPPASPAAPAAPPVASDLGPRPPVSLDPRVSIYSTRRPVLARTHVQGRVYNFLERPTGWKCFVYHFAVFLIVLVCLIFSVLSTIEQYAWRYYESSLEPYPDALATGTLFWMEIVLVVFFGTEYVVRLWSAGCRSKYVGLWGRLRFARKPISIIDLIVVVASMVVLCVGSKGQVFATSAIRGIRFLQILRMLHVDRQGGTWRLLGSVVFIHRQELITTLYIGFLGLIFSSYFVYLAEKDAVNESGRVEFGSYADALWWGVVTVTTIGYGDKVPQTWVGKTIASCFSVFAISFFALPAGILGSGFALKVQQKQRQKHFNRQIPAAASLIQTAWRCYAAENPDSSTWKIYIRKAPRSHTLLSPSPKPKKSVVVKKKKFKLDKDNGVTPGEKMLTVPHITCDPPEERRLDHFSVDGYDSSVRKSPTLLEVSMPHFMRTNSFAEDLDLEGETLLTPITHISQLREHHRATIKVIRRMQYFVAKKKFQQARKPYDVRDVIEQYSQGHLNLMVRIKELQRRLDQSIGKPSLFISVSEKSKDRGSNTIGARLNRVEDKVTQLDQRLALITDMLHQLLSLHGGSTPGSGGPPREGGAHITQPCGSGGSVDPELFLPSNTLPTYEQLTVPRRGPDEGSKVPVFTLEDFVGDWRQTAGYNLDQVLEQGGVSSLFQNLGVSVTPIQRIVLSGENGLKIDIHVIIPYEGLSGDQMGQIEKIFKVVYPVDDHHFKVILHYGTLVIDGVTPNMIDYFGRPYEGIAVFDGKKITVTGTLWNGNKIIDERLINPDGSLLFRVTINGVTGWRLCERILAGGGGSPSRLEEELRRRLTEP

SEQ ID NO: 447 - protein, 530 aa, Homo sapiens
MEDDSLYLGGEWQFNHFSKLTSSRPDAAFAEIQRTSLPEKSPLSCETRVDLCDDLAPVARQLAPREKLPLSSRRPAAVGAGLQNMGNTCYVNASLQCLTYTPPLANYMLSREHSQTCHRHKGCMLCTMQAHITRALHNPGHVIQPSQALAAGFHRGKQEDAHEFLMFTVDAMKKACLPGHKQVDHHSKDTTLIHQIFGGYWRSQIKCLHCHGISDTFDPYLDIALDIQAAQSVQQALEQLVKPEELNGENAYHCGVCLQRAPASKTLTLHTSAKVLILVLKRFSDVTGNKIAKNVQYPECLDMQPYMSQQNTGPLVYVLYAVLVHAGWSCHNGHYFSYVKAQEGQWYKMDDAEVTASSITSVLSQQAYVLFYIQKSEWERHSESVSRGREPRALGAEDTDRRATQGELKRDHPCLQAPELDEHLVERATQESTLDHWKFLQEQNKTKPEFNVRKVEGTLPPDVLVIHQSKYKCGMKNHHPEQQSSLLKLSSTTPTHQESMNTGTLASLRGRARRSKGKNKHSKRALLVCQ

SEQ ID NO: 448 - protein, 483 aa, Homo sapiens
KAPVGLKNVGNTCWFSAVIQSLFNLLEFRRLVLNYKPPSNAQDLPRNQKEHRNLPFMRELRYLFALLVGTKRKYVDPSRAVEILKDAFKSNDSQQQDVSEFTHKLLDWLEDAFQMKAEEETDEEKPKNPMVELFYGRFLAVGVLEGKKFENTEMFGQYPLQVNGFKDLHECLEAAMIEGEIESLHSENSGKSGQEHWFTELPPVLTFELSRFEFNQALGRPEKIHNKLEFPQVLYLDRYMHRNREITRIKREEIKRLKDYLTVLQQRLERYLSYGSGPKRFPLVDVLQYALEFASSKPVCTSPVDDIDASSPPSGSIPSQTLPSTTEQQGALSSELPSTSPSSVAAISSRSVIHKPFTQSRIPPDLPMHPAPRHITEEELSVLESCLHRWRTEIENDTRDLQESISRIHRTIELMYSDKSMIQVPYRLHAVLVHEGQANAGHYWAYIFDHRESRWMKYNDIAVTKSSWEELVRDSFGGYRNAS

What is claimed is:

1. A fusion protein comprising:
a. an effector domain comprising a catalytic domain of a deubiquitinase, or a functional fragment or functional variant thereof; and
b. a targeting domain comprising a targeting moiety that specifically binds a membrane protein that is not an ion channel.

2. The fusion protein of claim 1, wherein said deubiquitinase is a cysteine protease or a metalloprotease.

3. The fusion protein of claim 2, wherein said deubiquitinase is a cysteine protease.

4. The fusion protein of claim 3, wherein said cysteine protease is a ubiquitin-specific protease (USP), a ubiquitin C-terminal hydrolase (UCH), a Machado-Josephin domain protease (MJD), an ovarian tumour protease (OTU), a MINDY protease, or a ZUFSP protease.

5. The fusion protein of claim 4, wherein said cysteine protease is a USP.

6. The fusion protein of claim 5, wherein said USP is USP1, USP2, USP3, USP4, USP5, USP6, USP7, USP8, USP9X, USP9Y, USP10, USP11, USP12, USP13, USP14, USP15, USP16, USP17, USP17L2, USP17L3, USP17L4, USP17L5, USP17L7, USP17L8, USP18, USP19, USP20, USP21, USP22, USP23, USP24, USP25, USP26, USP27X, USP28, USP29, USP30, USP31, USP32, USP33, USP34, USP35, USP36, USP37, USP38, USP39, USP40, USP41, USP42, USP43, USP44, USP45, or USP46.

7. The fusion protein of claim 4, wherein said cysteine protease is a UCH.

8. The fusion protein of claim 7, wherein said UCH is BAP1, UCHL1, UCHL3, or UCHL5.

9. The fusion protein of claim 4, wherein said cysteine protease is a MJD.

10. The fusion protein of claim 9, wherein said MJD is ATXN3 or ATXN3L.

11. The fusion protein of claim 4, wherein said cysteine protease is a OTU.

12. The fusion protein of claim 11, wherein said OTU is OTUB1 or OTUB2.

13. The fusion protein of claim 4, wherein said cysteine protease is a MINDY.

14. The fusion protein of claim 13, wherein said MINDY is MINDY1, MINDY2, MINDY3, or MINDY4.

15. The fusion protein of claim 4, wherein said cysteine protease is a ZUFSP.

16. The fusion protein of claim 15, wherein said ZUFSP is ZUP1.

17. The fusion protein of claim 2, wherein said deubiquitinase is a metalloprotease.

18. The fusion protein of claim 17, wherein said metalloprotease is a Jab1/Mov34/Mpr1 Pad1 N-terminal+(MPN+) (JAMM) domain protease.

19. The fusion protein of any one of the preceding claims, wherein said deubiquitinase comprises an amino acid sequence at least 80%, 81%, 82%, 83%, 84%, 85%, 86%, 87%, 88%, 89%, 90%, 91%, 92%, 93%, 94%, 95%, 96%, 97%, 98%, 99%, or 100% identical to the amino acid sequence of any one of SEQ ID NOS: 1-112.

20. The fusion protein of any one of the preceding claims, wherein said catalytic domain comprises a catalytic domain derived from a deubiquitinase at least 80%, 81%, 82%, 83%, 84%, 85%, 86%, 87%, 88%, 89%, 90%, 91%, 92%, 93%, 94%, 95%, 96%, 97%, 98%, 99%, or 100% identical to the amino acid sequence of any one of SEQ ID NOS: 1-112.

21. The fusion protein of any one of the preceding claims, wherein said catalytic domain comprises an amino acid sequence at least 80%, 81%, 82%, 83%, 84%, 85%, 86%, 87%, 88%, 89%, 90%, 91%, 92%, 93%, 94%, 95%, 96%, 97%, 98%, 99%, or 100% identical to the amino acid sequence of any one of SEQ ID NOS: 113-220 or 293.

22. The fusion protein of any one of the preceding claims, wherein said catalytic domain comprises an amino acid sequence at least 80%, 81%, 82%, 83%, 84%, 85%, 86%, 87%, 88%, 89%, 90%, 91%, 92%, 93%, 94%, 95%, 96%, 97%, 98%, 99%, or 100% identical to the amino acid sequence of SEQ ID NO: 293.

23. The fusion protein of any one of the preceding claims, wherein said moiety that specifically binds a membrane protein comprises an antibody, or functional fragment or functional variant thereof.

24. The fusion protein of claim 23, wherein said antibody, or functional fragment or functional variant thereof, comprises a full-length antibody, a single chain variable fragment (scFv), a scFv2, a scFv-Fc, a Fab, a Fab′, a F(ab′)2, a F(v), a VHH, or a (VHH)₂.

25. The fusion protein of claim 23, wherein said antibody, or functional fragment or functional variant thereof, comprises a VHH or a (VHH)₂.

26. The fusion protein of any one of the preceding claims, wherein the membrane protein is selected from the group consisting of solute carrier family 2, facilitated glucose transporter member 1 (SLC2A1), proline-rich transmembrane protein 2 (PRRT2), usherin (USH2A), protocadherin-19 (PCDH19), tuberin (TSC2), hamartin (TSC1), dystrophin (DMD), Rhodopsin (RHO), protein jagged-1 (JAG1), inositol 1,4,5-trisphosphate receptor type 1 (ITPR1), sugar transporter SWEET1 (SLC50A1), transmembrane protein 258 (TMEM258), or follicle stimulating hormone receptor (FSHR).

27. The fusion protein of any one of the preceding claims, wherein the membrane protein comprises an amino acid sequence at least 90%, 91%, 92%, 93%, 94%, 95%, 96%, 97%, 98%, 99%, or 100% identical to the amino acid sequence of any one of SEQ ID NOS: 221-227 or 243-245.

28. The fusion protein of any one of the preceding claims, wherein said effector domain is directly operably connected to said targeting domain.

29. The fusion protein of any one of claims 1-28, wherein said effector domain is indirectly operably connected to said targeting domain.

30. The fusion protein of claim 28, wherein said effector domain is indirectly operably connected to said targeting domain via a peptide linker.

31. The fusion protein of claim 29, wherein said effector domain is indirectly operably connected to said targeting domain via a peptide linker of sufficient length such that said effector domain and said targeting domain can simultaneous bind the respective target proteins.

32. The fusion protein of claim 30 or 31, wherein said peptide linker comprises the amino acid sequence of any one of SEQ ID NOS: 297-424, or the amino acid sequence of any one of SEQ ID NOS: 297-424 comprising 1, 2, or 3 amino acid modifications.

33. The fusion protein of claim 32, wherein said peptide linker comprises the amino acid sequence of any one of SEQ ID NOS: 297-306, or the amino acid sequence of any one of SEQ ID NOS: 297-306 comprising 1, 2, or 3 amino acid modifications.

34. The fusion protein of any one of the preceding claims, wherein said effector domain is operably connected either directly or indirectly to the C terminus of said targeting domain.

35. The fusion protein of any one of claims 1-33, wherein said effector moiety is operably connected either directly or indirectly to the N terminus of said targeting domain.

36. A fusion protein comprising:
a. an effector domain comprising a catalytic domain of a deubiquitinase, or a functional fragment or functional variant thereof; and
b. a targeting domain comprising a targeting moiety that specifically binds a membrane protein selected from the group consisting of glutamate receptor ionotropic NMDA 2B (GRIN2B), cystic fibrosis transmembrane conductance regulator (CFTR), sodium channel protein type 1 subunit alpha (SCN1A), copper-transporting ATPase 2 (ATP7B), potassium voltage-gated channel subfamily KQT member 2 (KCNQ2), sodium channel protein type 2 subunit alpha (SCN2A), voltage-dependent P/Q-type calcium channel subunit alpha-1A (CACNA1A), sodium channel protein type 8 subunit alpha (SCN8A), glutamate receptor ionotropic, NMDA 2A (GRIN2A), sodium- and chloride-dependent GABA transporter 1 (SLC6A1), sodium/potassium-transporting ATPase subunit alpha-2 (ATP1A2), sodium/potassium-transporting ATPase subunit alpha-3 (ATP1A3), sodium channel protein type 9 subunit alpha (SCN9A), gamma-aminobutyric acid receptor subunit beta-3 (GABRB3), and potassium voltage-gated channel subfamily KQT member 3 (KCNQ3).

37. The fusion protein of claim 36, wherein said moiety that specifically binds a membrane protein comprises an antibody, or functional fragment or functional variant thereof.

38. The fusion protein of claim 37, wherein said antibody, or functional fragment or functional variant thereof, comprises a full-length antibody, a single chain variable fragment (scFv), a scFv2, a scFv-Fc, a Fab, a Fab′, a F(ab′)2, a F(v), a VHH, or a (VHH)₂.

39. The fusion protein of claim 38, wherein said antibody, or functional fragment or functional variant thereof, comprises a VHH or a (VHH)₂.

40. The fusion protein of any one of claims 36-39, wherein the membrane protein comprises an amino acid sequence at least 90%, 91%, 92%, 93%, 94%, 95%, 96%, 97%, 98%, 99%, or 100% identical to the amino acid sequence of any one of SEQ ID NOS: 228-245.

41. The fusion protein of any one of claims 36-40, wherein said deubiquitinase is a cysteine protease or a metalloprotease.

42. The fusion protein of claim 41, wherein said deubiquitinase is a cysteine protease.

43. The fusion protein of claim 41, wherein said cysteine protease is a ubiquitin-specific protease (USP), a ubiquitin C-terminal hydrolase (UCH), a Machado-Josephin domain protease (MJD), an ovarian tumour protease (OTU), a MINDY protease, or a ZUFSP protease.

44. The fusion protein of claim 43, wherein said cysteine protease is a USP.

45. The fusion protein of claim 44, wherein said USP is USP1, USP2, USP3, USP4, USP5, USP6, USP7, USP8, USP9X, USP9Y, USP10, USP11, USP12, USP13, USP14, USP15, USP16, USP17, USP17L2, USP17L3, USP17L4, USP17L5, USP17L7, USP17L8, USP18, USP19, USP20, USP21, USP22, USP23, USP24, USP25, USP26, USP27X, USP28, USP29, USP30, USP31, USP32, USP33, USP34, USP35, USP36, USP37, USP38, USP39, USP40, USP41, USP42, USP43, USP44, USP45, or USP46.

46. The fusion protein of claim 43, wherein said cysteine protease is a UCH.

47. The fusion protein of claim 46, wherein said UCH is BAP1, UCHL1, UCHL3, or UCHL5.

48. The fusion protein of claim 43, wherein said cysteine protease is a MJD.

49. The fusion protein of claim 48, wherein said MJD is ATXN3 or ATXN3L.

50. The fusion protein of claim 43, wherein said cysteine protease is a OTU.

51. The fusion protein of claim 50, wherein said OTU is OTUB1 or OTUB2.

52. The fusion protein of claim 43, wherein said cysteine protease is a MINDY.

53. The fusion protein of claim 52, wherein said MINDY is MINDY1, MINDY2, MINDY3, or MINDY4.

54. The fusion protein of claim 43, wherein said cysteine protease is a ZUFSP.

55. The fusion protein of claim 54, wherein said ZUFSP is ZUP1.

56. The fusion protein of claim 41, wherein said deubiquitinase is a metalloprotease.

57. The fusion protein of claim 56, wherein said metalloprotease is a Jab1/Mov34/Mpr1 Pad1 N-terminal+(MPN+) (JAMM) domain protease.

58. The fusion protein of any one of claims 36-57, wherein said deubiquitinase comprises an amino acid sequence at least 80%, 81%, 82%, 83%, 84%, 85%, 86%, 87%, 88%, 89%, 90%, 91%, 92%, 93%, 94%, 95%, 96%, 97%, 98%, 99%, or 100% identical to the amino acid sequence of any one of SEQ ID NOS: 1-112.

59. The fusion protein of any one of claims 36-58, wherein said catalytic domain comprises a catalytic domain derived from a deubiquitinase at least 80%, 81%, 82%, 83%, 84%, 85%, 86%, 87%, 88%, 89%, 90%, 91%, 92%, 93%, 94%, 95%, 96%, 97%, 98%, 99%, or 100% identical to the amino acid sequence of any one of SEQ ID NOS: 1-112.

60. The fusion protein of any one of claims 36-59, wherein said catalytic domain comprises an amino acid sequence at least 80%, 81%, 82%, 83%, 84%, 85%, 86%, 87%, 88%, 89%, 90%, 91%, 92%, 93%, 94%, 95%, 96%, 97%, 98%, 99%, or 100% identical to the amino acid sequence of any one of SEQ ID NOS: 113-220 or 293.

61. The fusion protein of any one of claims 36-60, wherein said catalytic domain comprises an amino acid sequence at least 80%, 81%, 82%, 83%, 84%, 85%, 86%, 87%, 88%, 89%, 90%, 91%, 92%, 93%, 94%, 95%, 96%, 97%, 98%, 99%, or 100% identical to the amino acid sequence of SEQ ID NO: 293.

62. The fusion protein of any one of claims 36-61, wherein said effector domain is directly operably connected to said targeting domain.

63. The fusion protein of any one of claims 36-62, wherein said effector domain is indirectly operably connected to said targeting domain.

64. The fusion protein of claim 63, wherein said effector domain is indirectly operably connected to said targeting domain via a peptide linker.

65. The fusion protein of claim 64, wherein said effector domain is indirectly operably connected to said targeting domain via a peptide linker of sufficient length such that said effector domain and said targeting domain can simultaneous bind the respective target proteins.

66. The fusion protein of claim 64 or 65, wherein said peptide linker comprises the amino acid sequence of any one of SEQ ID NOS: 297-424, or the amino acid sequence of any one of SEQ ID NOS: 297-424 comprising 1, 2, or 3 amino acid modifications.

67. The fusion protein of claim 66, wherein said peptide linker comprises the amino acid sequence of any one of SEQ ID NOS: 297-306, or the amino acid sequence of any one of SEQ ID NOS: 297-306 comprising 1, 2, or 3 amino acid modifications.

68. The fusion protein of any one of claims 36-67, wherein said effector domain is operably connected either directly or indirectly to the C terminus of said targeting domain.

69. The fusion protein of any one of claims 36-68, wherein said effector moiety is operably connected either directly or indirectly to the N terminus of said targeting domain.

70. A nucleic acid molecule encoding the fusion protein of any one of claims 1-69.

71. The nucleic acid molecule of claim 70, wherein the nucleic acid molecule is a DNA molecule.

72. The nucleic acid molecule of claim 70, wherein the nucleic acid molecule is an RNA molecule.

73. A vector comprising the nucleic acid molecule of any one of claims 70-72.

74. The vector of claim 73, wherein the vector is a plasmid or a viral vector.

75. A viral particle comprising the nucleic acid of any one of claims 70-72.

76. An in vitro cell or population of cells comprising the fusion protein of any one of claims 1-69, the nucleic acid molecule of any one of claims 70-72, or the vector of any one of claims 73-74.

77. A pharmaceutical composition comprising the fusion protein of any one of claims 1-69, the nucleic acid molecule of any one of claims 70-72, the vector of any one of claims 73-74, or the viral particle of claim 75, and an excipient.

78. A method of making the fusion protein of any one of claims 1-69, comprising
a. introducing into an in vitro cell or population of cells the nucleic acid molecule of any one of claims 70-72, the vector of any one of claims 73-74, the viral particle of claim 75;
b. culturing the cell or population of cells in a culture medium under conditions suitable for expression of the fusion protein,
c. isolating the fusion protein from the culture medium, and
d. optionally purifying the fusion protein.

79. A method of treating or preventing a disease in a subject comprising administering the fusion protein of any one of claims 1-69, the nucleic acid of any one of claims 70-72, the vector of any one of claims 73-74, the viral particle of claim 75, or the pharmaceutical composition of claim 77, to a subject in need thereof.

80. The method of claim 79, wherein the subject is human.

81. The method of any one of claims 79-80, wherein the disease is associated with decreased expression of a functional version of the membrane protein relative to a non-diseased control.

82. The method of any one of claims 79-81, wherein the disease is associated with decreased stability of a functional version of the membrane protein relative to a non-diseased control.

83. The method of any one of claims 79-82, wherein the disease is associated with increased ubiquitination and degradation of the membrane protein relative to a non-diseased control.

84. The method of any one of claims 79-83, wherein the disease is a genetic disease.

85. The method of claim 84, wherein the genetic disease is a haploinsufficiency disease.

86. The method of any one of claims 79-85, wherein the disease is a GRIN2B-Related Disorder, a SCN2A-Related Disorder, a SCN8A-Related Disorder, SLC6A1-Related Disorder, a PRRT2 Dyskinesia & Epilepsy, a GRIN2A-Related Disorder, a CACNA1A-Related Disorder, a SCN9A Epilepsy, a PCDH19 Encephalopathy, GLUT1 deficiency syndrome, episodic kinesigenic dyskinesia 1, Usher syndrome type 2A, early infantile epileptic encephalopathy type 9, tuberous sclerosis type 2; tuberous sclerosis type 1, a KCNQ2-Related Disorder (e.g., epileptic encephalopathy), Becker Muscular Dystrophy, autosomal Dominant RP, or Alagille syndrome 1, Gillespie Syndrome.

87. The method of any one of claims 79-86, wherein the disease is early infantile epileptic encephalopathy type 11, early infantile epileptic encephalopathy type 13, early infantile epileptic encephalopathy type 27, cystic fibrosis, Dravet syndrome, Wilson disease, episodic ataxia type 2; epilepsy (e.g., focal, with speech disorder and with or without mental retardation), myoclonic-atonic epilepsy, alternating hemiplegia of childhood, alternating hemiplegia of childhood type 2, epilepsy type 7, GABRB3 associated epilepsy, or a KCNQ2-Related Disorder (e.g., epileptic encephalopathy).

88. The method of any one of claims 79-87, wherein the disease is a GRIN2B-Related Disorder, a SCN2A-Related Disorder, a SCN8A-Related Disorder, SLC6A1-Related Disorder, a PRRT2 Dyskinesia & Epilepsy, a GRIN2A-Related Disorder, a CACNA1A-Related Disorder, a SCN9A Epilepsy, a PCDH19 Encephalopathy, early infantile epileptic encephalopathy type 9, early infantile epileptic encephalopathy type 11, early infantile epileptic encephalopathy type 13, early infantile epileptic encephalopathy type 27, cystic fibrosis, Dravet syndrome, Wilson disease, episodic ataxia type 2; GLUT1 deficiency syndrome, episodic kinesigenic dyskinesia 1, epilepsy (e.g., focal, with speech disorder and with or without mental retardation), KCNQ2 encephalopathy, myoclonic-atonic epilepsy, Usher syndrome type 2A, alternating hemiplegia of childhood, alternating hemiplegia of childhood type 2, epilepsy type 7, GABRB3 associated epilepsy; tuberous sclerosis type 2; tuberous sclerosis type 1, Becker Muscular Dystrophy, autosomal Dominant RP, Alagille syndrome 1, or Gillespie Syndrome.

89. Said method of any one of claims 79-88, wherein
a. said target membrane protein is GRIN2B, and said disease is a GRIN2B related disorder (e.g., an epileptic encephalopathy);
b. said target membrane protein is GRIN2B, and said disease is an early infantile epileptic encephalopathy;
c. said target membrane protein is GRIN2B, and said disease is early infantile epileptic encephalopathy type 27;
d. said target membrane protein is CFTR, and said disease is cystic fibrosis;
e. said target membrane protein is SCN1A, and said disease is Dravet syndrome;
f. said target membrane protein is ATP7B, and said disease is Wilson disease;
g. said target membrane protein is CACNA1A, and said disease is a CACA1A related disorder;
h. said target membrane protein is CACNA1A, and said disease is episodic ataxia type 2;
i. said target membrane protein is KCNQ2, and said disease is an KCNQ2 encephalopathy;
j. said target membrane protein is KCNQ2, and said disease is an epileptic encephalopathy;
k. said target membrane protein is SCN2A, and said disease is a SCN2A related disorder (e.g., an epileptic encephalopathy);
l. said target membrane protein is SCN2A, and said disease is early infantile epileptic encephalopathy type 11;
m. said target membrane protein is SLC2A1, and said disease is GLUT1 deficiency syndrome;
n. said target membrane protein is SCN8A, and said disease is a SCN8A related disorder (e.g., an epileptic encephalopathy);
o. said target membrane protein is SCN8A, and said disease is an epileptic encephalopathy;
p. said target membrane protein is SCN8A, and said disease is early infantile epileptic encephalopathy type 13;
q. said target membrane protein is PRRT2, and said disease is a PRRPT2 dyskinesia and/or epilepsy;
r. said target membrane protein is PRRT2, and said disease is an episodic kinesigenic dyskinesia type;
s. said target membrane protein is PRRT2, and said disease is episodic kinesigenic dyskinesia type 1;
t. said target membrane protein is GRIN2A, and said disease is a GRIN2A related disorder;
u. said target membrane protein is GRIN2A, and said disease is epilepsy;
v. said target membrane protein is GRIN2A, and said disease is focal epilepsy;
w. said target membrane protein is GRIN2A, and said disease is focal epilepsy with speech disorder and with or without mental retardation;
x. said target membrane protein is SLC6A1, and said disease is a SLC6A1 related disorder;
y. said target membrane protein is SLC6A1, and said disease is epilepsy;
z. said target membrane protein is SLC6A1, and said disease is myoclonic-atonic epilepsy;
aa. said target membrane protein is USH2A, and said disease is Usher syndrome;
bb. said target membrane protein is USH2A, and said disease is Usher syndrome type 2A;
cc. said target membrane protein is ATP1A2, and said disease is alternating hemiplegia of childhood;
dd. said target membrane protein is ATP1A2, and said disease is alternating hemiplegia of childhood type 1;
ee. said target membrane protein is ATP1A3, and said disease is alternating hemiplegia of childhood;
ff. said target membrane protein is ATP1A3, and said disease is alternating hemiplegia of childhood type 2;
gg. said target membrane protein is SCN9A, and said disease an SCN9A epilepsy;
hh. said target membrane protein is SCN9A1, and said disease an SCN9A epilepsy;
ii. said target membrane protein is SCN9A1, and said disease is epilepsy;
jj. said target membrane protein is SCN9A1, and said disease is epilepsy type 7;
kk. said target membrane protein is PCDH19, and said disease is PCDH19 encephalopathy;
ll. said target membrane protein is PCDH19, and said disease is an early infantile epileptic encephalopathy;
mm. said target membrane protein is PCDH19, and said disease is early infantile epileptic encephalopathy type 9;
nn. said target membrane protein is GABRB3, and said disease is epilepsy;
oo. said target membrane protein is GABRB3, and said disease is GABRB3 associated epilepsy;
pp. said target membrane protein is TSC2, and said disease is tuberous sclerosis;
qq. said target membrane protein is TSC2, and said disease is tuberous sclerosis type 2;
rr. said target membrane protein is TSC2, and said disease is tuberous sclerosis type 1;
ss. said target membrane protein is TSC1, and said disease is tuberous sclerosis;
tt. said target membrane protein is TSC1, and said disease is tuberous sclerosis type 1;
uu. said target membrane protein is TSC1, and said disease is tuberous sclerosis type 2;
vv. said target membrane protein is KCNQ3, and said disease is KCNQ2-Related Disorders (Epileptic Encephalopathy);
ww. said target membrane protein is DMD, and said disease is Becker Muscular Dystrophy;
xx. said target membrane protein is RHO, and said disease is Autosomal Dominant RP;
yy. said target membrane protein is JAG1, and said disease is Alagille syndrome 1;
zz. said target membrane protein is ITPR1, and said disease is Gillespie Syndrome; or
aaa. said target membrane protein is FSHR, and said disease is ovarian dysgenesis 1 (ODG1).

90. The method of any one of claims 79-89, wherein the fusion protein is administered at a therapeutically effective dose.

91. The method of any one of claims 79-90, wherein the fusion protein is administered systematically or locally.

92. The method of any one of claims 79-91, wherein the fusion protein is administered intravenously, subcutaneously, or intramuscularly.

93. The fusion protein of any one of claims 1-69, the polynucleotide of claim 70, the DNA of claim 71, the RNA of claim 72, the vector of any one of claims 73-74, the viral particle of claim 75, or the pharmaceutical composition of claim 77 for use as a medicament.

94. The fusion protein of any one of claims 1-69, the polynucleotide of claim 70, the DNA of claim 71, the RNA of claim 72, the vector of any one of claims 73-74, the viral particle of claim 75, or the pharmaceutical composition of claim 77 for use in treating or inhibiting a genetic disorder.
